United States Patent Application Publication US 2026/0365730 A1, published November 19, 2026 (application 19/133,550).

The application's sequence listing, which the Patent Office published only in electronic form, follows.

SEQUENCE LISTING (1433 sequences)

SEQ ID NO: 1 - protein, 329 aa, synthetic construct
  REGION 1..329: note = Human CD86
MDPQCTMGLSNILFVMAFLLSGAAPLKIQAYFNETADLPCQFANSQNQSLSELVVFWQDQENLVLNEVYLGKEKFDSVHSKYMGRTSFDSDSWTLRLHNLQIKDKGLYQCIIHHKKPTGMIRIHQMNSELSVLANFSQPEIVPISNITENVYINLTCSSIHGYPEPKKMSVLLRTKNSTIEYDGVMQKSQDNVTELYDVSISLSVSFPDVTSNMTIFCILETDKTRLLSSPFSIELEDPQPPPDHIPWITAVLPTVIICVMVFCLILWKWKKKKRPRNSYKCGTNTMEREESEQTKKREKIHIPERSDEAQRVFKSSKTSSCDKSDTCF

SEQ ID NO: 2 - protein, 224 aa, synthetic construct
  REGION 1..224: note = Human CD86 extracellular domain
APLKIQAYFNETADLPCQFANSQNQSLSELVVFWQDQENLVLNEVYLGKEKFDSVHSKYMGRTSFDSDSWTLRLHNLQIKDKGLYQCIIHHKKPTGMIRIHQMNSELSVLANFSQPEIVPISNITENVYINLTCSSIHGYPEPKKMSVLLRTKNSTIEYDGVMQKSQDNVTELYDVSISLSVSFPDVTSNMTIFCILETDKTRLLSSPFSIELEDPQPPPDHIP

SEQ ID NO: 3 - protein, 110 aa, synthetic construct
  REGION 1..110: note = Human CD86 extracellular domain IgV region
APLKIQAYFNETADLPCQFANSQNQSLSELVVFWQDQENLVLNEVYLGKEKFDSVHSKYMGRTSFDSDSWTLRLHNLQIKDKGLYQCIIHHKKPTGMIRIHQMNSELSVL

SEQ ID NO: 4 - protein, 448 aa, synthetic construct
  REGION 1..448: note = sugemalimab (CS1001 ) heavy chain
EVQLLESGGGLVQPGGSLRLSCAASGFTFSSYAMSWVRQAPGKGLEWVSGISGSGGFTYYADSVKGRFTISRDNSKNTLYLQMNSLRAEDTAVYYCAKPPRGYNYGPFDYWGQGTLVTVSSASTKGPSVFPLAPCSRSTSESTAALGCLVKDYFPEPVTVSWNSGALTSGVHTFPAVLQSSGLYSLSSVVTVPSSSLGTKTYTCNVDHKPSNTKVDKRVESKYGPPCPPCPAPEFLGGPSVFLFPPKPKDTLMISRTPEVTCVVVDVSQEDPEVQFNWYVDGVEVHNAKTKPREEQFNSTYRVVSVLTVLHQDWLNGKEYKCKVSNKGLPSSIEKTISKAKGQPREPQVYTLPPSQEEMTKNQVSLTCLVKGFYPSDIAVEWESNGQPENNYKTTPPVLDSDGSFFLYSRLTVDKSRWQEGNVFSCSVMHEALHNHYTQKSLSLSLGK

SEQ ID NO: 5 - protein, 214 aa, synthetic construct
  REGION 1..214: note = sugemalimab (CS1001 ) light chain
SYVLTQPPSVSVAPGQTARITCGGNNIGSKSVHWYQQKPGQAPVLVVYDDSDRPSGIPERFSGSNSGNTATLTISRVEAGDEADYYCQVWDSSSDHVVFGGGTKLTVLGQPKAAPSVTLFPPSSEELQANKATLVCLISDFYPGAVTVAWKADSSPVKAGVETTTPSKQSNNKYAASSYLSLTPEQWKSHRSYSCQVTHEGSTVEKTVAPTECS

SEQ ID NO: 6 - protein, 460 aa, synthetic construct
  REGION 1..460: note = JS003 heavy chain
QGQLQESGPSLVKPSQTLSLTCTVSGDSITRGYWNWIRKHPGKGLEYIGYISYTGSTYSNLSLKSRVTISRDTSKNQYYLKLSSVTAADTAVYYCATSTGWLDPVDYWGQGTLVTVSSASTKGPSVFPLAPCSRSTSESTAALGCLVKDYFPEPVTVSWNSGALTSGVHTFPAVLQSSGLYSLSSVVTVPSSSLGTKTYTCNVDHKPSNTKVDKRVESKYGPPCPPCPEPKSCDKTHTCPPCPAPEFEGGPSVFLFPPKPKDTLMISRTPEVTCVVVDVSHEDPEVKFNWYVDGVEVHNAKTKPREEQYNSTYRVVSVLTVLHQDWLNGKEYKCKVSNKALPASIEKTISKAKGQPREPQVYTLPPSREEMTKNQVSLTCLVKGFYPSDIAVEWESNGQPENNYKTTPPVLDSDGSFFLYSKLTVDKSRWQQGNVFSCSVMHEALHNHYTQKSLSLSPGK

SEQ ID NO: 7 - protein, 214 aa, synthetic construct
  REGION 1..214: note = JS003 light chain
DIVMTQSPDSLAVSLGERATINCKASQNVDTSVAWFQQKPGQPPKALIYSASFRYSGVPDRFSGSGSGTDFTLTISSLQAEDVAVYFCQQYYGYPFTFGQGTKLEIKRTVAAPSVFIFPPSDEQLKSGTASVVCLLNNFYPREAKVQWKVDNALQSGNSQESVTEQDSKDSTYSLSSTLTLSKADYEKHKVYACEVTHQGLSSPVTKSFNRGEC

SEQ ID NO: 8 - protein, 451 aa, synthetic construct
  REGION 1..451: note = Durvalumab heavy chain
EVQLVESGGGLVQPGGSLRLSCAASGFTFSRYWMSWVRQAPGKGLEWVANIKQDGSEKYYVDSVKGRFTISRDNAKNSLYLQMNSLRAEDTAVYYCAREGGWFGELAFDYWGQGTLVTVSSASTKGPSVFPLAPSSKSTSGGTAALGCLVKDYFPEPVTVSWNSGALTSGVHTFPAVLQSSGLYSLSSVVTVPSSSLGTQTYICNVNHKPSNTKVDKRVEPKSCDKTHTCPPCPAPEFEGGPSVFLFPPKPKDTLMISRTPEVTCVVVDVSHEDPEVKFNWYVDGVEVHNAKTKPREEQYNSTYRVVSVLTVLHQDWLNGKEYKCKVSNKALPASIEKTISKAKGQPREPQVYTLPPSREEMTKNQVSLTCLVKGFYPSDIAVEWESNGQPENNYKTTPPVLDSDGSFFLYSKLTVDKSRWQQGNVFSCSVMHEALHNHYTQKSLSLSPGK

SEQ ID NO: 9 - protein, 215 aa, synthetic construct
  REGION 1..215: note = Durvalumab light chain
EIVLTQSPGTLSLSPGERATLSCRASQRVSSSYLAWYQQKPGQAPRLLIYDASSRATGIPDRFSGSGSGTDFTLTISRLEPEDFAVYYCQQYGSLPWTFGQGTKVEIKRTVAAPSVFIFPPSDEQLKSGTASVVCLLNNFYPREAKVQWKVDNALQSGNSQESVTEQDSKDSTYSLSSTLTLSKADYEKHKVYACEVTHQGLSSPVTKSFNRGEC

SEQ ID NO: 10 - protein, 448 aa, synthetic construct
  REGION 1..448: note = Atezolizumab (MPDL3280A ) heavy chain
EVQLVESGGGLVQPGGSLRLSCAASGFTFSDSWIHWVRQAPGKGLEWVAWISPYGGSTYYADSVKGRFTISADTSKNTAYLQMNSLRAEDTAVYYCARRHWPGGFDYWGQGTLVTVSSASTKGPSVFPLAPSSKSTSGGTAALGCLVKDYFPEPVTVSWNSGALTSGVHTFPAVLQSSGLYSLSSVVTVPSSSLGTQTYICNVNHKPSNTKVDKKVEPKSCDKTHTCPPCPAPELLGGPSVFLFPPKPKDTLMISRTPEVTCVVVDVSHEDPEVKFNWYVDGVEVHNAKTKPREEQYASTYRVVSVLTVLHQDWLNGKEYKCKVSNKALPAPIEKTISKAKGQPREPQVYTLPPSREEMTKNQVSLTCLVKGFYPSDIAVEWESNGQPENNYKTTPPVLDSDGSFFLYSKLTVDKSRWQQGNVFSCSVMHEALHNHYTQKSLSLSPGK

SEQ ID NO: 11 - protein, 214 aa, synthetic construct
  REGION 1..214: note = Atezolizumab (MPDL3280A ) light chain
DIQMTQSPSSLSASVGDRVTITCRASQDVSTAVAWYQQKPGKAPKLLIYSASFLYSGVPSRFSGSGSGTDFTLTISSLQPEDFATYYCQQYLYHPATFGQGTKVEIKRTVAAPSVFIFPPSDEQLKSGTASVVCLLNNFYPREAKVQWKVDNALQSGNSQESVTEQDSKDSTYSLSSTLTLSKADYEKHKVYACEVTHQGLSSPVTKSFNRGEC

SEQ ID NO: 12 - protein, 450 aa, synthetic construct
  REGION 1..450: note = Avelumab (MSB0010718C ) heavy chain
EVQLLESGGGLVQPGGSLRLSCAASGFTFSSYIMMWVRQAPGKGLEWVSSIYPSGGITFYADTVKGRFTISRDNSKNTLYLQMNSLRAEDTAVYYCARIKLGTVTTVDYWGQGTLVTVSSASTKGPSVFPLAPSSKSTSGGTAALGCLVKDYFPEPVTVSWNSGALTSGVHTFPAVLQSSGLYSLSSVVTVPSSSLGTQTYICNVNHKPSNTKVDKKVEPKSCDKTHTCPPCPAPELLGGPSVFLFPPKPKDTLMISRTPEVTCVVVDVSHEDPEVKFNWYVDGVEVHNAKTKPREEQYNSTYRVVSVLTVLHQDWLNGKEYKCKVSNKALPAPIEKTISKAKGQPREPQVYTLPPSRDELTKNQVSLTCLVKGFYPSDIAVEWESNGQPENNYKTTPPVLDSDGSFFLYSKLTVDKSRWQQGNVFSCSVMHEALHNHYTQKSLSLSPGK

SEQ ID NO: 13 - protein, 216 aa, synthetic construct
  REGION 1..216: note = Avelumab (MSB0010718C ) light chain
QSALTQPASVSGSPGQSITISCTGTSSDVGGYNYVSWYQQHPGKAPKLMIYDVSNRPSGVSNRFSGSKSGNTASLTISGLQAEDEADYYCSSYTSSSTRVFGTGTKVTVLGQPKANPTVTLFPPSSEELQANKATLVCLISDFYPGAVTVAWKADGSPVKAGVETTKPSKQSNNKYAASSYLSLTPEQWKSHRSYSCQVTHEGSTVEKTVAPTECS

SEQ ID NO: 14 - protein, 360 aa, synthetic construct
  REGION 1..360: note = Envafolimab (KN035 )
QVQLVESGGGLVQPGGSLRLSCAASGKMSSRRCMAWFRQAPGKERERVAKLLTTSGSTYLADSVKGRFTISRDNSKNTVYLQMNSLRAEDTAVYYCAADSFEDPTCTLVTSSGAFQYWGQGTLVTVSSEPKSSDKTHTCPPCPAPELLGGPSVFLFPPKPKDTLMISRTPEVTCVVVAVSHEDPEVKFNWYVDGVEVHNAKTKPREEQYNSTYRVVSVLTVLHQDWLNGKEYKCKVSNKALPAGIEKTISKAKGQPREPQVYTLPPSRDELTKNQVSLTCLVKGFYPSDIAVEWESNGQPENNYKTTPPVLDSDGSFFLYSKLTVDKSRWQQGNVFSCSVMHEALHNHYTQKSLSLSPGK

SEQ ID NO: 15 - protein, 447 aa, synthetic construct
  REGION 1..447: note = Permbrolizumab (MK-3475 ) heavy chain
QVQLVQSGVEVKKPGASVKVSCKASGYTFTNYYMYWVRQAPGQGLEWMGGINPSNGGTNFNEKFKNRVTLTTDSSTTTAYMELKSLQFDDTAVYYCARRDYRFDMGFDYWGQGTTVTVSSASTKGPSVFPLAPCSRSTSESTAALGCLVKDYFPEPVTVSWNSGALTSGVHTFPAVLQSSGLYSLSSVVTVPSSSLGTKTYTCNVDHKPSNTKVDKRVESKYGPPCPPCPAPEFLGGPSVFLFPPKPKDTLMISRTPEVTCVVVDVSQEDPEVQFNWYVDGVEVHNAKTKPREEQFNSTYRVVSVLTVLHQDWLNGKEYKCKVSNKGLPSSIEKTISKAKGQPREPQVYTLPPSQEEMTKNQVSLTCLVKGFYPSDIAVEWESNGQPENNYKTTPPVLDSDGSFFLYSRLTVDKSRWQEGNVFSCSVMHEALHNHYTQKSLSLSLGK

SEQ ID NO: 16 - protein, 218 aa, synthetic construct
  REGION 1..218: note = Permbrolizumab (MK-3475 ) light chain
EIVLTQSPATLSLSPGERATLSCRASKGVSTSGYSYLHWYQQKPGQAPRLLIYLASYLESGVPARFSGSGSGTDFTLTISSLEPEDFAVYYCQHSRDLPLTFGGGTKVEIKRTVAAPSVFIFPPSDEQLKSGTASVVCLLNNFYPREAKVQWKVDNALQSGNSQESVTEQDSKDSTYSLSSTLTLSKADYEKHKVYACEVTHQGLSSPVTKSFNRGEC

SEQ ID NO: 17 - protein, 440 aa, synthetic construct
  REGION 1..440: note = Nivolumab (BMS-936558 ) heavy chain
QVQLVESGGGVVQPGRSLRLDCKASGITFSNSGMHWVRQAPGKGLEWVAVIWYDGSKRYYADSVKGRFTISRDNSKNTLFLQMNSLRAEDTAVYYCATNDDYWGQGTLVTVSSASTKGPSVFPLAPCSRSTSESTAALGCLVKDYFPEPVTVSWNSGALTSGVHTFPAVLQSSGLYSLSSVVTVPSSSLGTKTYTCNVDHKPSNTKVDKRVESKYGPPCPPCPAPEFLGGPSVFLFPPKPKDTLMISRTPEVTCVVVDVSQEDPEVQFNWYVDGVEVHNAKTKPREEQFNSTYRVVSVLTVLHQDWLNGKEYKCKVSNKGLPSSIEKTISKAKGQPREPQVYTLPPSQEEMTKNQVSLTCLVKGFYPSDIAVEWESNGQPENNYKTTPPVLDSDGSFFLYSRLTVDKSRWQEGNVFSCSVMHEALHNHYTQKSLSLSLGK

SEQ ID NO: 18 - protein, 214 aa, synthetic construct
  REGION 1..214: note = Nivolumab (BMS-936558 ) light chain
EIVLTQSPATLSLSPGERATLSCRASQSVSSYLAWYQQKPGQAPRLLIYDASNRATGIPARFSGSGSGTDFTLTISSLEPEDFAVYYCQQSSNWPRTFGQGTKVEIKRTVAAPSVFIFPPSDEQLKSGTASVVCLLNNFYPREAKVQWKVDNALQSGNSQESVTEQDSKDSTYSLSSTLTLSKADYEKHKVYACEVTHQGLSSPVTKSFNRGEC

SEQ ID NO: 19 - protein, 525 aa, synthetic construct
  REGION 1..525: note = Human LAG3 amino acid
MWEAQFLGLLFLQPLWVAPVKPLQPGAEVPVVWAQEGAPAQLPCSPTIPLQDLSLLRRAGVTWQHQPDSGPPAAAPGHPLAPGPHPAAPSSWGPRPRRYTVLSVGPGGLRSGRLPLQPRVQLDERGRQRGDFSLWLRPARRADAGEYRAAVHLRDRALSCRLRLRLGQASMTASPPGSLRASDWVILNCSFSRPDRPASVHWFRNRGQGRVPVRESPHHHLAESFLFLPQVSPMDSGPWGCILTYRDGFNVSIMYNLTVLGLEPPTPLTVYAGAGSRVGLPCRLPAGVGTRSFLTAKWTPPGGGPDLLVTGDNGDFTLRLEDVSQAQAGTYTCHIHLQEQQLNATVTLAIITVTPKSFGSPGSLGKLLCEVTPVSGQERFVWSSLDTPSQRSFSGPWLEAQEAQLLSQPWQCQLYQGERLLGAAVYFTELSSPGAQRSGRAPGALPAGHLLLFLILGVLSLLLLVTGAFGFHLWRRQWRPRRFSALEQGIHPPQAQSKIEELEQEPEPEPEPEPEPEPEPEPEQL

SEQ ID NO: 20 - protein, 428 aa, synthetic construct
  REGION 1..428: note = Human LAG3 extracellular domain
LQPGAEVPVVWAQEGAPAQLPCSPTIPLQDLSLLRRAGVTWQHQPDSGPPAAAPGHPLAPGPHPAAPSSWGPRPRRYTVLSVGPGGLRSGRLPLQPRVQLDERGRQRGDFSLWLRPARRADAGEYRAAVHLRDRALSCRLRLRLGQASMTASPPGSLRASDWVILNCSFSRPDRPASVHWFRNRGQGRVPVRESPHHHLAESFLFLPQVSPMDSGPWGCILTYRDGFNVSIMYNLTVLGLEPPTPLTVYAGAGSRVGLPCRLPAGVGTRSFLTAKWTPPGGGPDLLVTGDNGDFTLRLEDVSQAQAGTYTCHIHLQEQQLNATVTLAIITVTPKSFGSPGSLGKLLCEVTPVSGQERFVWSSLDTPSQRSFSGPWLEAQEAQLLSQPWQCQLYQGERLLGAAVYFTELSSPGAQRSGRAPGALPAGHL

SEQ ID NO: 21 - protein, 866 aa, synthetic construct
  REGION 1..866: note = linker linked Human LAG3 extracellular domain amino acid
LQPGAEVPVVWAQEGAPAQLPCSPTIPLQDLSLLRRAGVTWQHQPDSGPPAAAPGHPLAPGPHPAAPSSWGPRPRRYTVLSVGPGGLRSGRLPLQPRVQLDERGRQRGDFSLWLRPARRADAGEYRAAVHLRDRALSCRLRLRLGQASMTASPPGSLRASDWVILNCSFSRPDRPASVHWFRNRGQGRVPVRESPHHHLAESFLFLPQVSPMDSGPWGCILTYRDGFNVSIMYNLTVLGLEPPTPLTVYAGAGSRVGLPCRLPAGVGTRSFLTAKWTPPGGGPDLLVTGDNGDFTLRLEDVSQAQAGTYTCHIHLQEQQLNATVTLAIITVTPKSFGSPGSLGKLLCEVTPVSGQERFVWSSLDTPSQRSFSGPWLEAQEAQLLSQPWQCQLYQGERLLGAAVYFTELSSPGAQRSGRAPGALPAGHLGGGGSGGGGSLQPGAEVPVVWAQEGAPAQLPCSPTIPLQDLSLLRRAGVTWQHQPDSGPPAAAPGHPLAPGPHPAAPSSWGPRPRRYTVLSVGPGGLRSGRLPLQPRVQLDERGRQRGDFSLWLRPARRADAGEYRAAVHLRDRALSCRLRLRLGQASMTASPPGSLRASDWVILNCSFSRPDRPASVHWFRNRGQGRVPVRESPHHHLAESFLFLPQVSPMDSGPWGCILTYRDGFNVSIMYNLTVLGLEPPTPLTVYAGAGSRVGLPCRLPAGVGTRSFLTAKWTPPGGGPDLLVTGDNGDFTLRLEDVSQAQAGTYTCHIHLQEQQLNATVTLAIITVTPKSFGSPGSLGKLLCEVTPVSGQERFVWSSLDTPSQRSFSGPWLEAQEAQLLSQPWQCQLYQGERLLGAAVYFTELSSPGAQRSGRAPGALPAGHL

SEQ ID NO: 22 - protein, 131 aa, synthetic construct
  REGION 1..131: note = LAG3-IgD1
GAPAQLPCSPTIPLQDLSLLRRAGVTWQHQPDSGPPAAAPGHPLAPGPHPAAPSSWGPRPRRYTVLSVGPGGLRSGRLPLQPRVQLDERGRQRGDFSLWLRPARRADAGEYRAAVHLRDRALSCRLRLRLG

SEQ ID NO: 23 - protein, 85 aa, synthetic construct
  REGION 1..85: note = LAG3-IgD2
QASMTASPPGSLRASDWVILNCSFSRPDRPASVHWFRNRGQGRVPVRESPHHHLAESFLFLPQVSPMDSGPWGCILTYRDGFNVS

SEQ ID NO: 24 - protein, 79 aa, synthetic construct
  REGION 1..79: note = LAG3-IgD3
PTPLTVYAGAGSRVGLPCRLPAGVGTRSFLTAKWTPPGGGPDLLVTGDNGDFTLRLEDVSQAQAGTYTCHIHLQEQQLN

SEQ ID NO: 25 - protein, 72 aa, synthetic construct
  REGION 1..72: note = LAG3-IgD4
LAIITVTPKSFGSPGSLGKLLCEVTPVSGQERFVWSSLDTPSQRSFSGPWLEAQEAQLLSQPWQCQLYQGER

SEQ ID NO: 26 - protein, 216 aa, synthetic construct
  REGION 1..216: note = LAG3-D1/D2
GAPAQLPCSPTIPLQDLSLLRRAGVTWQHQPDSGPPAAAPGHPLAPGPHPAAPSSWGPRPRRYTVLSVGPGGLRSGRLPLQPRVQLDERGRQRGDFSLWLRPARRADAGEYRAAVHLRDRALSCRLRLRLGQASMTASPPGSLRASDWVILNCSFSRPDRPASVHWFRNRGQGRVPVRESPHHHLAESFLFLPQVSPMDSGPWGCILTYRDGFNVS

SEQ ID NO: 27 - protein, 307 aa, synthetic construct
  REGION 1..307: note = LAG3-D1/D2/D3
GAPAQLPCSPTIPLQDLSLLRRAGVTWQHQPDSGPPAAAPGHPLAPGPHPAAPSSWGPRPRRYTVLSVGPGGLRSGRLPLQPRVQLDERGRQRGDFSLWLRPARRADAGEYRAAVHLRDRALSCRLRLRLGQASMTASPPGSLRASDWVILNCSFSRPDRPASVHWFRNRGQGRVPVRESPHHHLAESFLFLPQVSPMDSGPWGCILTYRDGFNVSIMYNLTVLGLEPPTPLTVYAGAGSRVGLPCRLPAGVGTRSFLTAKWTPPGGGPDLLVTGDNGDFTLRLEDVSQAQAGTYTCHIHLQEQQLN

SEQ ID NO: 28 - protein, 383 aa, synthetic construct
  REGION 1..383: note = LAG3-D1/D2/D3/D4
GAPAQLPCSPTIPLQDLSLLRRAGVTWQHQPDSGPPAAAPGHPLAPGPHPAAPSSWGPRPRRYTVLSVGPGGLRSGRLPLQPRVQLDERGRQRGDFSLWLRPARRADAGEYRAAVHLRDRALSCRLRLRLGQASMTASPPGSLRASDWVILNCSFSRPDRPASVHWFRNRGQGRVPVRESPHHHLAESFLFLPQVSPMDSGPWGCILTYRDGFNVSIMYNLTVLGLEPPTPLTVYAGAGSRVGLPCRLPAGVGTRSFLTAKWTPPGGGPDLLVTGDNGDFTLRLEDVSQAQAGTYTCHIHLQEQQLNATVTLAIITVTPKSFGSPGSLGKLLCEVTPVSGQERFVWSSLDTPSQRSFSGPWLEAQEAQLLSQPWQCQLYQGER

SEQ ID NO: 29 - protein, 232 aa, synthetic construct
  REGION 1..232: note = Human immunoglobulin IgG1 Fc
EPKSCDKTHTCPPCPAPELLGGPSVFLFPPKPKDTLMISRTPEVTCVVVDVSHEDPEVKFNWYVDGVEVHNAKTKPREEQYNSTYRVVSVLTVLHQDWLNGKEYKCKVSNKALPAPIEKTISKAKGQPREPQVYTLPPSRDELTKNQVSLTCLVKGFYPSDIAVEWESNGQPENNYKTTPPVLDSDGSFFLYSKLTVDKSRWQQGNVFSCSVMHEALHNHYTQKSLSLSPGK

SEQ ID NO: 30 - protein, 229 aa, synthetic construct
  REGION 1..229: note = Human immunoglobulin IgG4 Fc
ESKYGPPCPSCPAPEFLGGPSVFLFPPKPKDTLMISRTPEVTCVVVDVSQEDPEVQFNWYVDGVEVHNAKTKPREEQFNSTYRVVSVLTVLHQDWLNGKEYKCKVSNKGLPSSIEKTISKAKGQPREPQVYTLPPSQEEMTKNQVSLTCLVKGFYPSDIAVEWESNGQPENNYKTTPPVLDSDGSFFLYSRLTVDKSRWQEGNVFSCSVMHEALHNHYTQKSLSLSLGK

SEQ ID NO: 31 - protein, 5 aa, synthetic construct
  REGION 1..5: note = linker GGGGS
GGGGS

SEQ ID NO: 32 - protein, 10 aa, synthetic construct
  REGION 1..10: note = linker GGGGSGGGGS
GGGGSGGGGS

SEQ ID NO: 33 - protein, 15 aa, synthetic construct
  REGION 1..15: note = linker GGGGSGGGGSGGGGS
GGGGSGGGGSGGGGS

SEQ ID NO: 34 - protein, 20 aa, synthetic construct
  REGION 1..20: note = linker GGGGSGGGGSGGGGSGGGGS
GGGGSGGGGSGGGGSGGGGS

SEQ ID NO: 35 - protein, 9 aa, synthetic construct
  REGION 1..9: note = linker GGGGSGGGS
GGGGSGGGS

SEQ ID NO: 36 - protein, 693 aa, synthetic construct
  REGION 1..693: note = sugemalimab heavy chain -CD86
EVQLLESGGGLVQPGGSLRLSCAASGFTFSSYAMSWVRQAPGKGLEWVSGISGSGGFTYYADSVKGRFTISRDNSKNTLYLQMNSLRAEDTAVYYCAKPPRGYNYGPFDYWGQGTLVTVSSASTKGPSVFPLAPCSRSTSESTAALGCLVKDYFPEPVTVSWNSGALTSGVHTFPAVLQSSGLYSLSSVVTVPSSSLGTKTYTCNVDHKPSNTKVDKRVESKYGPPCPPCPAPEFLGGPSVFLFPPKPKDTLMISRTPEVTCVVVDVSQEDPEVQFNWYVDGVEVHNAKTKPREEQFNSTYRVVSVLTVLHQDWLNGKEYKCKVSNKGLPSSIEKTISKAKGQPREPQVYTLPPSQEEMTKNQVSLTCLVKGFYPSDIAVEWESNGQPENNYKTTPPVLDSDGSFFLYSRLTVDKSRWQEGNVFSCSVMHEALHNHYTQKSLSLSLGAGGGGSGGGGSGGGGSGGGGSGAPLKIQAYFNETADLPCQFANSQNQSLSELVVFWQDQENLVLNEVYLGKEKFDSVHSKYMGRTSFDSDSWTLRLHNLQIKDKGLYQCIIHHKKPTGMIRIHQMNSELSVLANFSQPEIVPISNITENVYINLTCSSIHGYPEPKKMSVLLRTKNSTIEYDGVMQKSQDNVTELYDVSISLSVSFPDVTSNMTIFCILETDKTRLLSSPFSIELEDPQPPPDHIP

SEQ ID NO: 37 - protein, 579 aa, synthetic construct
  REGION 1..579: note = sugemalimab heavy chain -CD86 IgV
EVQLLESGGGLVQPGGSLRLSCAASGFTFSSYAMSWVRQAPGKGLEWVSGISGSGGFTYYADSVKGRFTISRDNSKNTLYLQMNSLRAEDTAVYYCAKPPRGYNYGPFDYWGQGTLVTVSSASTKGPSVFPLAPCSRSTSESTAALGCLVKDYFPEPVTVSWNSGALTSGVHTFPAVLQSSGLYSLSSVVTVPSSSLGTKTYTCNVDHKPSNTKVDKRVESKYGPPCPPCPAPEFLGGPSVFLFPPKPKDTLMISRTPEVTCVVVDVSQEDPEVQFNWYVDGVEVHNAKTKPREEQFNSTYRVVSVLTVLHQDWLNGKEYKCKVSNKGLPSSIEKTISKAKGQPREPQVYTLPPSQEEMTKNQVSLTCLVKGFYPSDIAVEWESNGQPENNYKTTPPVLDSDGSFFLYSRLTVDKSRWQEGNVFSCSVMHEALHNHYTQKSLSLSLGAGGGGSGGGGSGGGGSGGGGSGAPLKIQAYFNETADLPCQFANSQNQSLSELVVFWQDQENLVLNEVYLGKEKFDSVHSKYMGRTSFDSDSWTLRLHNLQIKDKGLYQCIIHHKKPTGMIRIHQMNSELSVL

SEQ ID NO: 38 - protein, 694 aa, synthetic construct
  REGION 1..694: note = CD86-sugemalimab heavy chain
APLKIQAYFNETADLPCQFANSQNQSLSELVVFWQDQENLVLNEVYLGKEKFDSVHSKYMGRTSFDSDSWTLRLHNLQIKDKGLYQCIIHHKKPTGMIRIHQMNSELSVLANFSQPEIVPISNITENVYINLTCSSIHGYPEPKKMSVLLRTKNSTIEYDGVMQKSQDNVTELYDVSISLSVSFPDVTSNMTIFCILETDKTRLLSSPFSIELEDPQPPPDHIPAGGGGSGGGGSGGGGSGGGGSGEVQLLESGGGLVQPGGSLRLSCAASGFTFSSYAMSWVRQAPGKGLEWVSGISGSGGFTYYADSVKGRFTISRDNSKNTLYLQMNSLRAEDTAVYYCAKPPRGYNYGPFDYWGQGTLVTVSSASTKGPSVFPLAPCSRSTSESTAALGCLVKDYFPEPVTVSWNSGALTSGVHTFPAVLQSSGLYSLSSVVTVPSSSLGTKTYTCNVDHKPSNTKVDKRVESKYGPPCPPCPAPEFLGGPSVFLFPPKPKDTLMISRTPEVTCVVVDVSQEDPEVQFNWYVDGVEVHNAKTKPREEQFNSTYRVVSVLTVLHQDWLNGKEYKCKVSNKGLPSSIEKTISKAKGQPREPQVYTLPPSQEEMTKNQVSLTCLVKGFYPSDIAVEWESNGQPENNYKTTPPVLDSDGSFFLYSRLTVDKSRWQEGNVFSCSVMHEALHNHYTQKSLSLSLGK

SEQ ID NO: 39 - protein, 580 aa, synthetic construct
  REGION 1..580: note = CD86 IgV-sugemalimab heavy chain
APLKIQAYFNETADLPCQFANSQNQSLSELVVFWQDQENLVLNEVYLGKEKFDSVHSKYMGRTSFDSDSWTLRLHNLQIKDKGLYQCIIHHKKPTGMIRIHQMNSELSVLAGGGGSGGGGSGGGGSGGGGSGEVQLLESGGGLVQPGGSLRLSCAASGFTFSSYAMSWVRQAPGKGLEWVSGISGSGGFTYYADSVKGRFTISRDNSKNTLYLQMNSLRAEDTAVYYCAKPPRGYNYGPFDYWGQGTLVTVSSASTKGPSVFPLAPCSRSTSESTAALGCLVKDYFPEPVTVSWNSGALTSGVHTFPAVLQSSGLYSLSSVVTVPSSSLGTKTYTCNVDHKPSNTKVDKRVESKYGPPCPPCPAPEFLGGPSVFLFPPKPKDTLMISRTPEVTCVVVDVSQEDPEVQFNWYVDGVEVHNAKTKPREEQFNSTYRVVSVLTVLHQDWLNGKEYKCKVSNKGLPSSIEKTISKAKGQPREPQVYTLPPSQEEMTKNQVSLTCLVKGFYPSDIAVEWESNGQPENNYKTTPPVLDSDGSFFLYSRLTVDKSRWQEGNVFSCSVMHEALHNHYTQKSLSLSLGK

SEQ ID NO: 40 - protein, 459 aa, synthetic construct
  REGION 1..459: note = sugemalimab light chain -CD86
SYVLTQPPSVSVAPGQTARITCGGNNIGSKSVHWYQQKPGQAPVLVVYDDSDRPSGIPERFSGSNSGNTATLTISRVEAGDEADYYCQVWDSSSDHVVFGGGTKLTVLGQPKAAPSVTLFPPSSEELQANKATLVCLISDFYPGAVTVAWKADSSPVKAGVETTTPSKQSNNKYAASSYLSLTPEQWKSHRSYSCQVTHEGSTVEKTVAPTECSGGGGSGGGGSGGGGSGGGGSGAPLKIQAYFNETADLPCQFANSQNQSLSELVVFWQDQENLVLNEVYLGKEKFDSVHSKYMGRTSFDSDSWTLRLHNLQIKDKGLYQCIIHHKKPTGMIRIHQMNSELSVLANFSQPEIVPISNITENVYINLTCSSIHGYPEPKKMSVLLRTKNSTIEYDGVMQKSQDNVTELYDVSISLSVSFPDVTSNMTIFCILETDKTRLLSSPFSIELEDPQPPPDHIP

SEQ ID NO: 41 - protein, 345 aa, synthetic construct
  REGION 1..345: note = sugemalimab light chain -CD86 IgV
SYVLTQPPSVSVAPGQTARITCGGNNIGSKSVHWYQQKPGQAPVLVVYDDSDRPSGIPERFSGSNSGNTATLTISRVEAGDEADYYCQVWDSSSDHVVFGGGTKLTVLGQPKAAPSVTLFPPSSEELQANKATLVCLISDFYPGAVTVAWKADSSPVKAGVETTTPSKQSNNKYAASSYLSLTPEQWKSHRSYSCQVTHEGSTVEKTVAPTECSGGGGSGGGGSGGGGSGGGGSGAPLKIQAYFNETADLPCQFANSQNQSLSELVVFWQDQENLVLNEVYLGKEKFDSVHSKYMGRTSFDSDSWTLRLHNLQIKDKGLYQCIIHHKKPTGMIRIHQMNSELSVL

SEQ ID NO: 42 - protein, 460 aa, synthetic construct
  REGION 1..460: note = CD86-sugemalimab light chain
APLKIQAYFNETADLPCQFANSQNQSLSELVVFWQDQENLVLNEVYLGKEKFDSVHSKYMGRTSFDSDSWTLRLHNLQIKDKGLYQCIIHHKKPTGMIRIHQMNSELSVLANFSQPEIVPISNITENVYINLTCSSIHGYPEPKKMSVLLRTKNSTIEYDGVMQKSQDNVTELYDVSISLSVSFPDVTSNMTIFCILETDKTRLLSSPFSIELEDPQPPPDHIPAGGGGSGGGGSGGGGSGGGGSGSYVLTQPPSVSVAPGQTARITCGGNNIGSKSVHWYQQKPGQAPVLVVYDDSDRPSGIPERFSGSNSGNTATLTISRVEAGDEADYYCQVWDSSSDHVVFGGGTKLTVLGQPKAAPSVTLFPPSSEELQANKATLVCLISDFYPGAVTVAWKADSSPVKAGVETTTPSKQSNNKYAASSYLSLTPEQWKSHRSYSCQVTHEGSTVEKTVAPTECS

SEQ ID NO: 43 - protein, 346 aa, synthetic construct
  REGION 1..346: note = CD86 IgV-sugemalimab light chain
APLKIQAYFNETADLPCQFANSQNQSLSELVVFWQDQENLVLNEVYLGKEKFDSVHSKYMGRTSFDSDSWTLRLHNLQIKDKGLYQCIIHHKKPTGMIRIHQMNSELSVLAGGGGSGGGGSGGGGSGGGGSGSYVLTQPPSVSVAPGQTARITCGGNNIGSKSVHWYQQKPGQAPVLVVYDDSDRPSGIPERFSGSNSGNTATLTISRVEAGDEADYYCQVWDSSSDHVVFGGGTKLTVLGQPKAAPSVTLFPPSSEELQANKATLVCLISDFYPGAVTVAWKADSSPVKAGVETTTPSKQSNNKYAASSYLSLTPEQWKSHRSYSCQVTHEGSTVEKTVAPTECS

SEQ ID NO: 44 - protein, 696 aa, synthetic construct
  REGION 1..696: note = Durvalumab heavy chain -CD86
EVQLVESGGGLVQPGGSLRLSCAASGFTFSRYWMSWVRQAPGKGLEWVANIKQDGSEKYYVDSVKGRFTISRDNAKNSLYLQMNSLRAEDTAVYYCAREGGWFGELAFDYWGQGTLVTVSSASTKGPSVFPLAPSSKSTSGGTAALGCLVKDYFPEPVTVSWNSGALTSGVHTFPAVLQSSGLYSLSSVVTVPSSSLGTQTYICNVNHKPSNTKVDKRVEPKSCDKTHTCPPCPAPEFEGGPSVFLFPPKPKDTLMISRTPEVTCVVVDVSHEDPEVKFNWYVDGVEVHNAKTKPREEQYNSTYRVVSVLTVLHQDWLNGKEYKCKVSNKALPASIEKTISKAKGQPREPQVYTLPPSREEMTKNQVSLTCLVKGFYPSDIAVEWESNGQPENNYKTTPPVLDSDGSFFLYSKLTVDKSRWQQGNVFSCSVMHEALHNHYTQKSLSLSPGAGGGGSGGGGSGGGGSGGGGSGAPLKIQAYFNETADLPCQFANSQNQSLSELVVFWQDQENLVLNEVYLGKEKFDSVHSKYMGRTSFDSDSWTLRLHNLQIKDKGLYQCIIHHKKPTGMIRIHQMNSELSVLANFSQPEIVPISNITENVYINLTCSSIHGYPEPKKMSVLLRTKNSTIEYDGVMQKSQDNVTELYDVSISLSVSFPDVTSNMTIFCILETDKTRLLSSPFSIELEDPQPPPDHIP

SEQ ID NO: 45 - protein, 582 aa, synthetic construct
  REGION 1..582: note = Durvalumab heavy chain -CD86 IgV
EVQLVESGGGLVQPGGSLRLSCAASGFTFSRYWMSWVRQAPGKGLEWVANIKQDGSEKYYVDSVKGRFTISRDNAKNSLYLQMNSLRAEDTAVYYCAREGGWFGELAFDYWGQGTLVTVSSASTKGPSVFPLAPSSKSTSGGTAALGCLVKDYFPEPVTVSWNSGALTSGVHTFPAVLQSSGLYSLSSVVTVPSSSLGTQTYICNVNHKPSNTKVDKRVEPKSCDKTHTCPPCPAPEFEGGPSVFLFPPKPKDTLMISRTPEVTCVVVDVSHEDPEVKFNWYVDGVEVHNAKTKPREEQYNSTYRVVSVLTVLHQDWLNGKEYKCKVSNKALPASIEKTISKAKGQPREPQVYTLPPSREEMTKNQVSLTCLVKGFYPSDIAVEWESNGQPENNYKTTPPVLDSDGSFFLYSKLTVDKSRWQQGNVFSCSVMHEALHNHYTQKSLSLSPGAGGGGSGGGGSGGGGSGGGGSGAPLKIQAYFNETADLPCQFANSQNQSLSELVVFWQDQENLVLNEVYLGKEKFDSVHSKYMGRTSFDSDSWTLRLHNLQIKDKGLYQCIIHHKKPTGMIRIHQMNSELSVL

SEQ ID NO: 46 - protein, 697 aa, synthetic construct
  REGION 1..697: note = CD86-Durvalumab heavy chain
APLKIQAYFNETADLPCQFANSQNQSLSELVVFWQDQENLVLNEVYLGKEKFDSVHSKYMGRTSFDSDSWTLRLHNLQIKDKGLYQCIIHHKKPTGMIRIHQMNSELSVLANFSQPEIVPISNITENVYINLTCSSIHGYPEPKKMSVLLRTKNSTIEYDGVMQKSQDNVTELYDVSISLSVSFPDVTSNMTIFCILETDKTRLLSSPFSIELEDPQPPPDHIPAGGGGSGGGGSGGGGSGGGGSGEVQLVESGGGLVQPGGSLRLSCAASGFTFSRYWMSWVRQAPGKGLEWVANIKQDGSEKYYVDSVKGRFTISRDNAKNSLYLQMNSLRAEDTAVYYCAREGGWFGELAFDYWGQGTLVTVSSASTKGPSVFPLAPSSKSTSGGTAALGCLVKDYFPEPVTVSWNSGALTSGVHTFPAVLQSSGLYSLSSVVTVPSSSLGTQTYICNVNHKPSNTKVDKRVEPKSCDKTHTCPPCPAPEFEGGPSVFLFPPKPKDTLMISRTPEVTCVVVDVSHEDPEVKFNWYVDGVEVHNAKTKPREEQYNSTYRVVSVLTVLHQDWLNGKEYKCKVSNKALPASIEKTISKAKGQPREPQVYTLPPSREEMTKNQVSLTCLVKGFYPSDIAVEWESNGQPENNYKTTPPVLDSDGSFFLYSKLTVDKSRWQQGNVFSCSVMHEALHNHYTQKSLSLSPGK

SEQ ID NO: 47 - protein, 583 aa, synthetic construct
  REGION 1..583: note = CD86 IgV-Durvalumab heavy chain
APLKIQAYFNETADLPCQFANSQNQSLSELVVFWQDQENLVLNEVYLGKEKFDSVHSKYMGRTSFDSDSWTLRLHNLQIKDKGLYQCIIHHKKPTGMIRIHQMNSELSVLAGGGGSGGGGSGGGGSGGGGSGEVQLVESGGGLVQPGGSLRLSCAASGFTFSRYWMSWVRQAPGKGLEWVANIKQDGSEKYYVDSVKGRFTISRDNAKNSLYLQMNSLRAEDTAVYYCAREGGWFGELAFDYWGQGTLVTVSSASTKGPSVFPLAPSSKSTSGGTAALGCLVKDYFPEPVTVSWNSGALTSGVHTFPAVLQSSGLYSLSSVVTVPSSSLGTQTYICNVNHKPSNTKVDKRVEPKSCDKTHTCPPCPAPEFEGGPSVFLFPPKPKDTLMISRTPEVTCVVVDVSHEDPEVKFNWYVDGVEVHNAKTKPREEQYNSTYRVVSVLTVLHQDWLNGKEYKCKVSNKALPASIEKTISKAKGQPREPQVYTLPPSREEMTKNQVSLTCLVKGFYPSDIAVEWESNGQPENNYKTTPPVLDSDGSFFLYSKLTVDKSRWQQGNVFSCSVMHEALHNHYTQKSLSLSPGK

SEQ ID NO: 48 - protein, 460 aa, synthetic construct
  REGION 1..460: note = Durvalumab light chain -CD86
EIVLTQSPGTLSLSPGERATLSCRASQRVSSSYLAWYQQKPGQAPRLLIYDASSRATGIPDRFSGSGSGTDFTLTISRLEPEDFAVYYCQQYGSLPWTFGQGTKVEIKRTVAAPSVFIFPPSDEQLKSGTASVVCLLNNFYPREAKVQWKVDNALQSGNSQESVTEQDSKDSTYSLSSTLTLSKADYEKHKVYACEVTHQGLSSPVTKSFNRGECGGGGSGGGGSGGGGSGGGGSGAPLKIQAYFNETADLPCQFANSQNQSLSELVVFWQDQENLVLNEVYLGKEKFDSVHSKYMGRTSFDSDSWTLRLHNLQIKDKGLYQCIIHHKKPTGMIRIHQMNSELSVLANFSQPEIVPISNITENVYINLTCSSIHGYPEPKKMSVLLRTKNSTIEYDGVMQKSQDNVTELYDVSISLSVSFPDVTSNMTIFCILETDKTRLLSSPFSIELEDPQPPPDHIP

SEQ ID NO: 49 - protein, 346 aa, synthetic construct
  REGION 1..346: note = Durvalumab light chain -CD86 IgV
EIVLTQSPGTLSLSPGERATLSCRASQRVSSSYLAWYQQKPGQAPRLLIYDASSRATGIPDRFSGSGSGTDFTLTISRLEPEDFAVYYCQQYGSLPWTFGQGTKVEIKRTVAAPSVFIFPPSDEQLKSGTASVVCLLNNFYPREAKVQWKVDNALQSGNSQESVTEQDSKDSTYSLSSTLTLSKADYEKHKVYACEVTHQGLSSPVTKSFNRGECGGGGSGGGGSGGGGSGGGGSGAPLKIQAYFNETADLPCQFANSQNQSLSELVVFWQDQENLVLNEVYLGKEKFDSVHSKYMGRTSFDSDSWTLRLHNLQIKDKGLYQCIIHHKKPTGMIRIHQMNSELSVL

SEQ ID NO: 50 - protein, 461 aa, synthetic construct
  REGION 1..461: note = CD86-Durvalumab light chain
APLKIQAYFNETADLPCQFANSQNQSLSELVVFWQDQENLVLNEVYLGKEKFDSVHSKYMGRTSFDSDSWTLRLHNLQIKDKGLYQCIIHHKKPTGMIRIHQMNSELSVLANFSQPEIVPISNITENVYINLTCSSIHGYPEPKKMSVLLRTKNSTIEYDGVMQKSQDNVTELYDVSISLSVSFPDVTSNMTIFCILETDKTRLLSSPFSIELEDPQPPPDHIPAGGGGSGGGGSGGGGSGGGGSGEIVLTQSPGTLSLSPGERATLSCRASQRVSSSYLAWYQQKPGQAPRLLIYDASSRATGIPDRFSGSGSGTDFTLTISRLEPEDFAVYYCQQYGSLPWTFGQGTKVEIKRTVAAPSVFIFPPSDEQLKSGTASVVCLLNNFYPREAKVQWKVDNALQSGNSQESVTEQDSKDSTYSLSSTLTLSKADYEKHKVYACEVTHQGLSSPVTKSFNRGEC

SEQ ID NO: 51 - protein, 347 aa, synthetic construct
  REGION 1..347: note = CD86 IgV-Durvalumab light chain
APLKIQAYFNETADLPCQFANSQNQSLSELVVFWQDQENLVLNEVYLGKEKFDSVHSKYMGRTSFDSDSWTLRLHNLQIKDKGLYQCIIHHKKPTGMIRIHQMNSELSVLAGGGGSGGGGSGGGGSGGGGSGEIVLTQSPGTLSLSPGERATLSCRASQRVSSSYLAWYQQKPGQAPRLLIYDASSRATGIPDRFSGSGSGTDFTLTISRLEPEDFAVYYCQQYGSLPWTFGQGTKVEIKRTVAAPSVFIFPPSDEQLKSGTASVVCLLNNFYPREAKVQWKVDNALQSGNSQESVTEQDSKDSTYSLSSTLTLSKADYEKHKVYACEVTHQGLSSPVTKSFNRGEC

SEQ ID NO: 52 - protein, 693 aa, synthetic construct
  REGION 1..693: note = Atezolizumab heavy chain -CD86
EVQLVESGGGLVQPGGSLRLSCAASGFTFSDSWIHWVRQAPGKGLEWVAWISPYGGSTYYADSVKGRFTISADTSKNTAYLQMNSLRAEDTAVYYCARRHWPGGFDYWGQGTLVTVSSASTKGPSVFPLAPSSKSTSGGTAALGCLVKDYFPEPVTVSWNSGALTSGVHTFPAVLQSSGLYSLSSVVTVPSSSLGTQTYICNVNHKPSNTKVDKKVEPKSCDKTHTCPPCPAPELLGGPSVFLFPPKPKDTLMISRTPEVTCVVVDVSHEDPEVKFNWYVDGVEVHNAKTKPREEQYASTYRVVSVLTVLHQDWLNGKEYKCKVSNKALPAPIEKTISKAKGQPREPQVYTLPPSREEMTKNQVSLTCLVKGFYPSDIAVEWESNGQPENNYKTTPPVLDSDGSFFLYSKLTVDKSRWQQGNVFSCSVMHEALHNHYTQKSLSLSPGAGGGGSGGGGSGGGGSGGGGSGAPLKIQAYFNETADLPCQFANSQNQSLSELVVFWQDQENLVLNEVYLGKEKFDSVHSKYMGRTSFDSDSWTLRLHNLQIKDKGLYQCIIHHKKPTGMIRIHQMNSELSVLANFSQPEIVPISNITENVYINLTCSSIHGYPEPKKMSVLLRTKNSTIEYDGVMQKSQDNVTELYDVSISLSVSFPDVTSNMTIFCILETDKTRLLSSPFSIELEDPQPPPDHIP

SEQ ID NO: 53 - protein, 579 aa, synthetic construct
  REGION 1..579: note = Atezolizumab heavy chain -CD86 IgV
EVQLVESGGGLVQPGGSLRLSCAASGFTFSDSWIHWVRQAPGKGLEWVAWISPYGGSTYYADSVKGRFTISADTSKNTAYLQMNSLRAEDTAVYYCARRHWPGGFDYWGQGTLVTVSSASTKGPSVFPLAPSSKSTSGGTAALGCLVKDYFPEPVTVSWNSGALTSGVHTFPAVLQSSGLYSLSSVVTVPSSSLGTQTYICNVNHKPSNTKVDKKVEPKSCDKTHTCPPCPAPELLGGPSVFLFPPKPKDTLMISRTPEVTCVVVDVSHEDPEVKFNWYVDGVEVHNAKTKPREEQYASTYRVVSVLTVLHQDWLNGKEYKCKVSNKALPAPIEKTISKAKGQPREPQVYTLPPSREEMTKNQVSLTCLVKGFYPSDIAVEWESNGQPENNYKTTPPVLDSDGSFFLYSKLTVDKSRWQQGNVFSCSVMHEALHNHYTQKSLSLSPGAGGGGSGGGGSGGGGSGGGGSGAPLKIQAYFNETADLPCQFANSQNQSLSELVVFWQDQENLVLNEVYLGKEKFDSVHSKYMGRTSFDSDSWTLRLHNLQIKDKGLYQCIIHHKKPTGMIRIHQMNSELSVL

SEQ ID NO: 54 - protein, 694 aa, synthetic construct
  REGION 1..694: note = CD86-Atezolizumab heavy chain
APLKIQAYFNETADLPCQFANSQNQSLSELVVFWQDQENLVLNEVYLGKEKFDSVHSKYMGRTSFDSDSWTLRLHNLQIKDKGLYQCIIHHKKPTGMIRIHQMNSELSVLANFSQPEIVPISNITENVYINLTCSSIHGYPEPKKMSVLLRTKNSTIEYDGVMQKSQDNVTELYDVSISLSVSFPDVTSNMTIFCILETDKTRLLSSPFSIELEDPQPPPDHIPAGGGGSGGGGSGGGGSGGGGSGEVQLVESGGGLVQPGGSLRLSCAASGFTFSDSWIHWVRQAPGKGLEWVAWISPYGGSTYYADSVKGRFTISADTSKNTAYLQMNSLRAEDTAVYYCARRHWPGGFDYWGQGTLVTVSSASTKGPSVFPLAPSSKSTSGGTAALGCLVKDYFPEPVTVSWNSGALTSGVHTFPAVLQSSGLYSLSSVVTVPSSSLGTQTYICNVNHKPSNTKVDKKVEPKSCDKTHTCPPCPAPELLGGPSVFLFPPKPKDTLMISRTPEVTCVVVDVSHEDPEVKFNWYVDGVEVHNAKTKPREEQYASTYRVVSVLTVLHQDWLNGKEYKCKVSNKALPAPIEKTISKAKGQPREPQVYTLPPSREEMTKNQVSLTCLVKGFYPSDIAVEWESNGQPENNYKTTPPVLDSDGSFFLYSKLTVDKSRWQQGNVFSCSVMHEALHNHYTQKSLSLSPGK

SEQ ID NO: 55 - protein, 580 aa, synthetic construct
  REGION 1..580: note = CD86 IgV-Atezolizumab heavy chain
APLKIQAYFNETADLPCQFANSQNQSLSELVVFWQDQENLVLNEVYLGKEKFDSVHSKYMGRTSFDSDSWTLRLHNLQIKDKGLYQCIIHHKKPTGMIRIHQMNSELSVLAGGGGSGGGGSGGGGSGGGGSGEVQLVESGGGLVQPGGSLRLSCAASGFTFSDSWIHWVRQAPGKGLEWVAWISPYGGSTYYADSVKGRFTISADTSKNTAYLQMNSLRAEDTAVYYCARRHWPGGFDYWGQGTLVTVSSASTKGPSVFPLAPSSKSTSGGTAALGCLVKDYFPEPVTVSWNSGALTSGVHTFPAVLQSSGLYSLSSVVTVPSSSLGTQTYICNVNHKPSNTKVDKKVEPKSCDKTHTCPPCPAPELLGGPSVFLFPPKPKDTLMISRTPEVTCVVVDVSHEDPEVKFNWYVDGVEVHNAKTKPREEQYASTYRVVSVLTVLHQDWLNGKEYKCKVSNKALPAPIEKTISKAKGQPREPQVYTLPPSREEMTKNQVSLTCLVKGFYPSDIAVEWESNGQPENNYKTTPPVLDSDGSFFLYSKLTVDKSRWQQGNVFSCSVMHEALHNHYTQKSLSLSPGK

SEQ ID NO: 56 - protein, 459 aa, synthetic construct
  REGION 1..459: note = Atezolizumab light chain -CD86
DIQMTQSPSSLSASVGDRVTITCRASQDVSTAVAWYQQKPGKAPKLLIYSASFLYSGVPSRFSGSGSGTDFTLTISSLQPEDFATYYCQQYLYHPATFGQGTKVEIKRTVAAPSVFIFPPSDEQLKSGTASVVCLLNNFYPREAKVQWKVDNALQSGNSQESVTEQDSKDSTYSLSSTLTLSKADYEKHKVYACEVTHQGLSSPVTKSFNRGECGGGGSGGGGSGGGGSGGGGSGAPLKIQAYFNETADLPCQFANSQNQSLSELVVFWQDQENLVLNEVYLGKEKFDSVHSKYMGRTSFDSDSWTLRLHNLQIKDKGLYQCIIHHKKPTGMIRIHQMNSELSVLANFSQPEIVPISNITENVYINLTCSSIHGYPEPKKMSVLLRTKNSTIEYDGVMQKSQDNVTELYDVSISLSVSFPDVTSNMTIFCILETDKTRLLSSPFSIELEDPQPPPDHIP

SEQ ID NO: 57 - protein, 345 aa, synthetic construct
  REGION 1..345: note = Atezolizumab light chain -CD86 IgV
DIQMTQSPSSLSASVGDRVTITCRASQDVSTAVAWYQQKPGKAPKLLIYSASFLYSGVPSRFSGSGSGTDFTLTISSLQPEDFATYYCQQYLYHPATFGQGTKVEIKRTVAAPSVFIFPPSDEQLKSGTASVVCLLNNFYPREAKVQWKVDNALQSGNSQESVTEQDSKDSTYSLSSTLTLSKADYEKHKVYACEVTHQGLSSPVTKSFNRGECGGGGSGGGGSGGGGSGGGGSGAPLKIQAYFNETADLPCQFANSQNQSLSELVVFWQDQENLVLNEVYLGKEKFDSVHSKYMGRTSFDSDSWTLRLHNLQIKDKGLYQCIIHHKKPTGMIRIHQMNSELSVL

SEQ ID NO: 58 - protein, 460 aa, synthetic construct
  REGION 1..460: note = CD86-Atezolizumab light chain
APLKIQAYFNETADLPCQFANSQNQSLSELVVFWQDQENLVLNEVYLGKEKFDSVHSKYMGRTSFDSDSWTLRLHNLQIKDKGLYQCIIHHKKPTGMIRIHQMNSELSVLANFSQPEIVPISNITENVYINLTCSSIHGYPEPKKMSVLLRTKNSTIEYDGVMQKSQDNVTELYDVSISLSVSFPDVTSNMTIFCILETDKTRLLSSPFSIELEDPQPPPDHIPAGGGGSGGGGSGGGGSGGGGSGDIQMTQSPSSLSASVGDRVTITCRASQDVSTAVAWYQQKPGKAPKLLIYSASFLYSGVPSRFSGSGSGTDFTLTISSLQPEDFATYYCQQYLYHPATFGQGTKVEIKRTVAAPSVFIFPPSDEQLKSGTASVVCLLNNFYPREAKVQWKVDNALQSGNSQESVTEQDSKDSTYSLSSTLTLSKADYEKHKVYACEVTHQGLSSPVTKSFNRGEC

SEQ ID NO: 59 - protein, 346 aa, synthetic construct
  REGION 1..346: note = CD86 IgV-Atezolizumab light chain
APLKIQAYFNETADLPCQFANSQNQSLSELVVFWQDQENLVLNEVYLGKEKFDSVHSKYMGRTSFDSDSWTLRLHNLQIKDKGLYQCIIHHKKPTGMIRIHQMNSELSVLAGGGGSGGGGSGGGGSGGGGSGDIQMTQSPSSLSASVGDRVTITCRASQDVSTAVAWYQQKPGKAPKLLIYSASFLYSGVPSRFSGSGSGTDFTLTISSLQPEDFATYYCQQYLYHPATFGQGTKVEIKRTVAAPSVFIFPPSDEQLKSGTASVVCLLNNFYPREAKVQWKVDNALQSGNSQESVTEQDSKDSTYSLSSTLTLSKADYEKHKVYACEVTHQGLSSPVTKSFNRGEC

SEQ ID NO: 60 - protein, 695 aa, synthetic construct
  REGION 1..695: note = Avelumab heavy chain -CD86
EVQLLESGGGLVQPGGSLRLSCAASGFTFSSYIMMWVRQAPGKGLEWVSSIYPSGGITFYADTVKGRFTISRDNSKNTLYLQMNSLRAEDTAVYYCARIKLGTVTTVDYWGQGTLVTVSSASTKGPSVFPLAPSSKSTSGGTAALGCLVKDYFPEPVTVSWNSGALTSGVHTFPAVLQSSGLYSLSSVVTVPSSSLGTQTYICNVNHKPSNTKVDKKVEPKSCDKTHTCPPCPAPELLGGPSVFLFPPKPKDTLMISRTPEVTCVVVDVSHEDPEVKFNWYVDGVEVHNAKTKPREEQYNSTYRVVSVLTVLHQDWLNGKEYKCKVSNKALPAPIEKTISKAKGQPREPQVYTLPPSRDELTKNQVSLTCLVKGFYPSDIAVEWESNGQPENNYKTTPPVLDSDGSFFLYSKLTVDKSRWQQGNVFSCSVMHEALHNHYTQKSLSLSPGAGGGGSGGGGSGGGGSGGGGSGAPLKIQAYFNETADLPCQFANSQNQSLSELVVFWQDQENLVLNEVYLGKEKFDSVHSKYMGRTSFDSDSWTLRLHNLQIKDKGLYQCIIHHKKPTGMIRIHQMNSELSVLANFSQPEIVPISNITENVYINLTCSSIHGYPEPKKMSVLLRTKNSTIEYDGVMQKSQDNVTELYDVSISLSVSFPDVTSNMTIFCILETDKTRLLSSPFSIELEDPQPPPDHIP

SEQ ID NO: 61 - protein, 581 aa, synthetic construct
  REGION 1..581: note = Avelumab heavy chain -CD86 IgV
EVQLLESGGGLVQPGGSLRLSCAASGFTFSSYIMMWVRQAPGKGLEWVSSIYPSGGITFYADTVKGRFTISRDNSKNTLYLQMNSLRAEDTAVYYCARIKLGTVTTVDYWGQGTLVTVSSASTKGPSVFPLAPSSKSTSGGTAALGCLVKDYFPEPVTVSWNSGALTSGVHTFPAVLQSSGLYSLSSVVTVPSSSLGTQTYICNVNHKPSNTKVDKKVEPKSCDKTHTCPPCPAPELLGGPSVFLFPPKPKDTLMISRTPEVTCVVVDVSHEDPEVKFNWYVDGVEVHNAKTKPREEQYNSTYRVVSVLTVLHQDWLNGKEYKCKVSNKALPAPIEKTISKAKGQPREPQVYTLPPSRDELTKNQVSLTCLVKGFYPSDIAVEWESNGQPENNYKTTPPVLDSDGSFFLYSKLTVDKSRWQQGNVFSCSVMHEALHNHYTQKSLSLSPGAGGGGSGGGGSGGGGSGGGGSGAPLKIQAYFNETADLPCQFANSQNQSLSELVVFWQDQENLVLNEVYLGKEKFDSVHSKYMGRTSFDSDSWTLRLHNLQIKDKGLYQCIIHHKKPTGMIRIHQMNSELSVL

SEQ ID NO: 62 - protein, 696 aa, synthetic construct
  REGION 1..696: note = CD86-Avelumab heavy chain
APLKIQAYFNETADLPCQFANSQNQSLSELVVFWQDQENLVLNEVYLGKEKFDSVHSKYMGRTSFDSDSWTLRLHNLQIKDKGLYQCIIHHKKPTGMIRIHQMNSELSVLANFSQPEIVPISNITENVYINLTCSSIHGYPEPKKMSVLLRTKNSTIEYDGVMQKSQDNVTELYDVSISLSVSFPDVTSNMTIFCILETDKTRLLSSPFSIELEDPQPPPDHIPAGGGGSGGGGSGGGGSGGGGSGEVQLLESGGGLVQPGGSLRLSCAASGFTFSSYIMMWVRQAPGKGLEWVSSIYPSGGITFYADTVKGRFTISRDNSKNTLYLQMNSLRAEDTAVYYCARIKLGTVTTVDYWGQGTLVTVSSASTKGPSVFPLAPSSKSTSGGTAALGCLVKDYFPEPVTVSWNSGALTSGVHTFPAVLQSSGLYSLSSVVTVPSSSLGTQTYICNVNHKPSNTKVDKKVEPKSCDKTHTCPPCPAPELLGGPSVFLFPPKPKDTLMISRTPEVTCVVVDVSHEDPEVKFNWYVDGVEVHNAKTKPREEQYNSTYRVVSVLTVLHQDWLNGKEYKCKVSNKALPAPIEKTISKAKGQPREPQVYTLPPSRDELTKNQVSLTCLVKGFYPSDIAVEWESNGQPENNYKTTPPVLDSDGSFFLYSKLTVDKSRWQQGNVFSCSVMHEALHNHYTQKSLSLSPGK

SEQ ID NO: 63 - protein, 582 aa, synthetic construct
  REGION 1..582: note = CD86 IgV-Avelumab heavy chain
APLKIQAYFNETADLPCQFANSQNQSLSELVVFWQDQENLVLNEVYLGKEKFDSVHSKYMGRTSFDSDSWTLRLHNLQIKDKGLYQCIIHHKKPTGMIRIHQMNSELSVLAGGGGSGGGGSGGGGSGGGGSGEVQLLESGGGLVQPGGSLRLSCAASGFTFSSYIMMWVRQAPGKGLEWVSSIYPSGGITFYADTVKGRFTISRDNSKNTLYLQMNSLRAEDTAVYYCARIKLGTVTTVDYWGQGTLVTVSSASTKGPSVFPLAPSSKSTSGGTAALGCLVKDYFPEPVTVSWNSGALTSGVHTFPAVLQSSGLYSLSSVVTVPSSSLGTQTYICNVNHKPSNTKVDKKVEPKSCDKTHTCPPCPAPELLGGPSVFLFPPKPKDTLMISRTPEVTCVVVDVSHEDPEVKFNWYVDGVEVHNAKTKPREEQYNSTYRVVSVLTVLHQDWLNGKEYKCKVSNKALPAPIEKTISKAKGQPREPQVYTLPPSRDELTKNQVSLTCLVKGFYPSDIAVEWESNGQPENNYKTTPPVLDSDGSFFLYSKLTVDKSRWQQGNVFSCSVMHEALHNHYTQKSLSLSPGK

SEQ ID NO: 64 - protein, 461 aa, synthetic construct
  REGION 1..461: note = Avelumab light chain -CD86
QSALTQPASVSGSPGQSITISCTGTSSDVGGYNYVSWYQQHPGKAPKLMIYDVSNRPSGVSNRFSGSKSGNTASLTISGLQAEDEADYYCSSYTSSSTRVFGTGTKVTVLGQPKANPTVTLFPPSSEELQANKATLVCLISDFYPGAVTVAWKADGSPVKAGVETTKPSKQSNNKYAASSYLSLTPEQWKSHRSYSCQVTHEGSTVEKTVAPTECSGGGGSGGGGSGGGGSGGGGSGAPLKIQAYFNETADLPCQFANSQNQSLSELVVFWQDQENLVLNEVYLGKEKFDSVHSKYMGRTSFDSDSWTLRLHNLQIKDKGLYQCIIHHKKPTGMIRIHQMNSELSVLANFSQPEIVPISNITENVYINLTCSSIHGYPEPKKMSVLLRTKNSTIEYDGVMQKSQDNVTELYDVSISLSVSFPDVTSNMTIFCILETDKTRLLSSPFSIELEDPQPPPDHIP

SEQ ID NO: 65 - protein, 347 aa, synthetic construct
  REGION 1..347: note = Avelumab light chain -CD86 IgV
QSALTQPASVSGSPGQSITISCTGTSSDVGGYNYVSWYQQHPGKAPKLMIYDVSNRPSGVSNRFSGSKSGNTASLTISGLQAEDEADYYCSSYTSSSTRVFGTGTKVTVLGQPKANPTVTLFPPSSEELQANKATLVCLISDFYPGAVTVAWKADGSPVKAGVETTKPSKQSNNKYAASSYLSLTPEQWKSHRSYSCQVTHEGSTVEKTVAPTECSGGGGSGGGGSGGGGSGGGGSGAPLKIQAYFNETADLPCQFANSQNQSLSELVVFWQDQENLVLNEVYLGKEKFDSVHSKYMGRTSFDSDSWTLRLHNLQIKDKGLYQCIIHHKKPTGMIRIHQMNSELSVL

SEQ ID NO: 66 - protein, 462 aa, synthetic construct
  REGION 1..462: note = CD86-Avelumab light chain
APLKIQAYFNETADLPCQFANSQNQSLSELVVFWQDQENLVLNEVYLGKEKFDSVHSKYMGRTSFDSDSWTLRLHNLQIKDKGLYQCIIHHKKPTGMIRIHQMNSELSVLANFSQPEIVPISNITENVYINLTCSSIHGYPEPKKMSVLLRTKNSTIEYDGVMQKSQDNVTELYDVSISLSVSFPDVTSNMTIFCILETDKTRLLSSPFSIELEDPQPPPDHIPAGGGGSGGGGSGGGGSGGGGSGQSALTQPASVSGSPGQSITISCTGTSSDVGGYNYVSWYQQHPGKAPKLMIYDVSNRPSGVSNRFSGSKSGNTASLTISGLQAEDEADYYCSSYTSSSTRVFGTGTKVTVLGQPKANPTVTLFPPSSEELQANKATLVCLISDFYPGAVTVAWKADGSPVKAGVETTKPSKQSNNKYAASSYLSLTPEQWKSHRSYSCQVTHEGSTVEKTVAPTECS

SEQ ID NO: 67 - protein, 348 aa, synthetic construct
  REGION 1..348: note = CD86 IgV-Avelumab light chain
APLKIQAYFNETADLPCQFANSQNQSLSELVVFWQDQENLVLNEVYLGKEKFDSVHSKYMGRTSFDSDSWTLRLHNLQIKDKGLYQCIIHHKKPTGMIRIHQMNSELSVLAGGGGSGGGGSGGGGSGGGGSGQSALTQPASVSGSPGQSITISCTGTSSDVGGYNYVSWYQQHPGKAPKLMIYDVSNRPSGVSNRFSGSKSGNTASLTISGLQAEDEADYYCSSYTSSSTRVFGTGTKVTVLGQPKANPTVTLFPPSSEELQANKATLVCLISDFYPGAVTVAWKADGSPVKAGVETTKPSKQSNNKYAASSYLSLTPEQWKSHRSYSCQVTHEGSTVEKTVAPTECS

SEQ ID NO: 68 - protein, 605 aa, synthetic construct
  REGION 1..605: note = Envafolimab-CD86
QVQLVESGGGLVQPGGSLRLSCAASGKMSSRRCMAWFRQAPGKERERVAKLLTTSGSTYLADSVKGRFTISRDNSKNTVYLQMNSLRAEDTAVYYCAADSFEDPTCTLVTSSGAFQYWGQGTLVTVSSEPKSSDKTHTCPPCPAPELLGGPSVFLFPPKPKDTLMISRTPEVTCVVVAVSHEDPEVKFNWYVDGVEVHNAKTKPREEQYNSTYRVVSVLTVLHQDWLNGKEYKCKVSNKALPAGIEKTISKAKGQPREPQVYTLPPSRDELTKNQVSLTCLVKGFYPSDIAVEWESNGQPENNYKTTPPVLDSDGSFFLYSKLTVDKSRWQQGNVFSCSVMHEALHNHYTQKSLSLSPGAGGGGSGGGGSGGGGSGGGGSGAPLKIQAYFNETADLPCQFANSQNQSLSELVVFWQDQENLVLNEVYLGKEKFDSVHSKYMGRTSFDSDSWTLRLHNLQIKDKGLYQCIIHHKKPTGMIRIHQMNSELSVLANFSQPEIVPISNITENVYINLTCSSIHGYPEPKKMSVLLRTKNSTIEYDGVMQKSQDNVTELYDVSISLSVSFPDVTSNMTIFCILETDKTRLLSSPFSIELEDPQPPPDHIP

SEQ ID NO: 69 - protein, 491 aa, synthetic construct
  REGION 1..491: note = Envafolimab-CD86 IgV
QVQLVESGGGLVQPGGSLRLSCAASGKMSSRRCMAWFRQAPGKERERVAKLLTTSGSTYLADSVKGRFTISRDNSKNTVYLQMNSLRAEDTAVYYCAADSFEDPTCTLVTSSGAFQYWGQGTLVTVSSEPKSSDKTHTCPPCPAPELLGGPSVFLFPPKPKDTLMISRTPEVTCVVVAVSHEDPEVKFNWYVDGVEVHNAKTKPREEQYNSTYRVVSVLTVLHQDWLNGKEYKCKVSNKALPAGIEKTISKAKGQPREPQVYTLPPSRDELTKNQVSLTCLVKGFYPSDIAVEWESNGQPENNYKTTPPVLDSDGSFFLYSKLTVDKSRWQQGNVFSCSVMHEALHNHYTQKSLSLSPGAGGGGSGGGGSGGGGSGGGGSGAPLKIQAYFNETADLPCQFANSQNQSLSELVVFWQDQENLVLNEVYLGKEKFDSVHSKYMGRTSFDSDSWTLRLHNLQIKDKGLYQCIIHHKKPTGMIRIHQMNSELSVL

SEQ ID NO: 70 - protein, 606 aa, synthetic construct
  REGION 1..606: note = CD86-Envafolimab
APLKIQAYFNETADLPCQFANSQNQSLSELVVFWQDQENLVLNEVYLGKEKFDSVHSKYMGRTSFDSDSWTLRLHNLQIKDKGLYQCIIHHKKPTGMIRIHQMNSELSVLANFSQPEIVPISNITENVYINLTCSSIHGYPEPKKMSVLLRTKNSTIEYDGVMQKSQDNVTELYDVSISLSVSFPDVTSNMTIFCILETDKTRLLSSPFSIELEDPQPPPDHIPAGGGGSGGGGSGGGGSGGGGSGQVQLVESGGGLVQPGGSLRLSCAASGKMSSRRCMAWFRQAPGKERERVAKLLTTSGSTYLADSVKGRFTISRDNSKNTVYLQMNSLRAEDTAVYYCAADSFEDPTCTLVTSSGAFQYWGQGTLVTVSSEPKSSDKTHTCPPCPAPELLGGPSVFLFPPKPKDTLMISRTPEVTCVVVAVSHEDPEVKFNWYVDGVEVHNAKTKPREEQYNSTYRVVSVLTVLHQDWLNGKEYKCKVSNKALPAGIEKTISKAKGQPREPQVYTLPPSRDELTKNQVSLTCLVKGFYPSDIAVEWESNGQPENNYKTTPPVLDSDGSFFLYSKLTVDKSRWQQGNVFSCSVMHEALHNHYTQKSLSLSPGK

SEQ ID NO: 71 - protein, 492 aa, synthetic construct
  REGION 1..492: note = CD86 IgV-Envafolimab
APLKIQAYFNETADLPCQFANSQNQSLSELVVFWQDQENLVLNEVYLGKEKFDSVHSKYMGRTSFDSDSWTLRLHNLQIKDKGLYQCIIHHKKPTGMIRIHQMNSELSVLAGGGGSGGGGSGGGGSGGGGSGQVQLVESGGGLVQPGGSLRLSCAASGKMSSRRCMAWFRQAPGKERERVAKLLTTSGSTYLADSVKGRFTISRDNSKNTVYLQMNSLRAEDTAVYYCAADSFEDPTCTLVTSSGAFQYWGQGTLVTVSSEPKSSDKTHTCPPCPAPELLGGPSVFLFPPKPKDTLMISRTPEVTCVVVAVSHEDPEVKFNWYVDGVEVHNAKTKPREEQYNSTYRVVSVLTVLHQDWLNGKEYKCKVSNKALPAGIEKTISKAKGQPREPQVYTLPPSRDELTKNQVSLTCLVKGFYPSDIAVEWESNGQPENNYKTTPPVLDSDGSFFLYSKLTVDKSRWQQGNVFSCSVMHEALHNHYTQKSLSLSPGK

SEQ ID NO: 72 - protein, 692 aa, synthetic construct
  REGION 1..692: note = Permbrolizumab heavy chain -CD86
QVQLVQSGVEVKKPGASVKVSCKASGYTFTNYYMYWVRQAPGQGLEWMGGINPSNGGTNFNEKFKNRVTLTTDSSTTTAYMELKSLQFDDTAVYYCARRDYRFDMGFDYWGQGTTVTVSSASTKGPSVFPLAPCSRSTSESTAALGCLVKDYFPEPVTVSWNSGALTSGVHTFPAVLQSSGLYSLSSVVTVPSSSLGTKTYTCNVDHKPSNTKVDKRVESKYGPPCPPCPAPEFLGGPSVFLFPPKPKDTLMISRTPEVTCVVVDVSQEDPEVQFNWYVDGVEVHNAKTKPREEQFNSTYRVVSVLTVLHQDWLNGKEYKCKVSNKGLPSSIEKTISKAKGQPREPQVYTLPPSQEEMTKNQVSLTCLVKGFYPSDIAVEWESNGQPENNYKTTPPVLDSDGSFFLYSRLTVDKSRWQEGNVFSCSVMHEALHNHYTQKSLSLSLGAGGGGSGGGGSGGGGSGGGGSGAPLKIQAYFNETADLPCQFANSQNQSLSELVVFWQDQENLVLNEVYLGKEKFDSVHSKYMGRTSFDSDSWTLRLHNLQIKDKGLYQCIIHHKKPTGMIRIHQMNSELSVLANFSQPEIVPISNITENVYINLTCSSIHGYPEPKKMSVLLRTKNSTIEYDGVMQKSQDNVTELYDVSISLSVSFPDVTSNMTIFCILETDKTRLLSSPFSIELEDPQPPPDHIP

SEQ ID NO: 73 - protein, 578 aa, synthetic construct
  REGION 1..578: note = Permbrolizumab heavy chain -CD86 IgV
QVQLVQSGVEVKKPGASVKVSCKASGYTFTNYYMYWVRQAPGQGLEWMGGINPSNGGTNFNEKFKNRVTLTTDSSTTTAYMELKSLQFDDTAVYYCARRDYRFDMGFDYWGQGTTVTVSSASTKGPSVFPLAPCSRSTSESTAALGCLVKDYFPEPVTVSWNSGALTSGVHTFPAVLQSSGLYSLSSVVTVPSSSLGTKTYTCNVDHKPSNTKVDKRVESKYGPPCPPCPAPEFLGGPSVFLFPPKPKDTLMISRTPEVTCVVVDVSQEDPEVQFNWYVDGVEVHNAKTKPREEQFNSTYRVVSVLTVLHQDWLNGKEYKCKVSNKGLPSSIEKTISKAKGQPREPQVYTLPPSQEEMTKNQVSLTCLVKGFYPSDIAVEWESNGQPENNYKTTPPVLDSDGSFFLYSRLTVDKSRWQEGNVFSCSVMHEALHNHYTQKSLSLSLGAGGGGSGGGGSGGGGSGGGGSGAPLKIQAYFNETADLPCQFANSQNQSLSELVVFWQDQENLVLNEVYLGKEKFDSVHSKYMGRTSFDSDSWTLRLHNLQIKDKGLYQCIIHHKKPTGMIRIHQMNSELSVL

SEQ ID NO: 74 - protein, 693 aa, synthetic construct
  REGION 1..693: note = CD86-Permbrolizumab heavy chain
APLKIQAYFNETADLPCQFANSQNQSLSELVVFWQDQENLVLNEVYLGKEKFDSVHSKYMGRTSFDSDSWTLRLHNLQIKDKGLYQCIIHHKKPTGMIRIHQMNSELSVLANFSQPEIVPISNITENVYINLTCSSIHGYPEPKKMSVLLRTKNSTIEYDGVMQKSQDNVTELYDVSISLSVSFPDVTSNMTIFCILETDKTRLLSSPFSIELEDPQPPPDHIPAGGGGSGGGGSGGGGSGGGGSGQVQLVQSGVEVKKPGASVKVSCKASGYTFTNYYMYWVRQAPGQGLEWMGGINPSNGGTNFNEKFKNRVTLTTDSSTTTAYMELKSLQFDDTAVYYCARRDYRFDMGFDYWGQGTTVTVSSASTKGPSVFPLAPCSRSTSESTAALGCLVKDYFPEPVTVSWNSGALTSGVHTFPAVLQSSGLYSLSSVVTVPSSSLGTKTYTCNVDHKPSNTKVDKRVESKYGPPCPPCPAPEFLGGPSVFLFPPKPKDTLMISRTPEVTCVVVDVSQEDPEVQFNWYVDGVEVHNAKTKPREEQFNSTYRVVSVLTVLHQDWLNGKEYKCKVSNKGLPSSIEKTISKAKGQPREPQVYTLPPSQEEMTKNQVSLTCLVKGFYPSDIAVEWESNGQPENNYKTTPPVLDSDGSFFLYSRLTVDKSRWQEGNVFSCSVMHEALHNHYTQKSLSLSLGK

SEQ ID NO: 75 - protein, 579 aa, synthetic construct
  REGION 1..579: note = CD86 IgV-Permbrolizumab heavy chain
APLKIQAYFNETADLPCQFANSQNQSLSELVVFWQDQENLVLNEVYLGKEKFDSVHSKYMGRTSFDSDSWTLRLHNLQIKDKGLYQCIIHHKKPTGMIRIHQMNSELSVLAGGGGSGGGGSGGGGSGGGGSGQVQLVQSGVEVKKPGASVKVSCKASGYTFTNYYMYWVRQAPGQGLEWMGGINPSNGGTNFNEKFKNRVTLTTDSSTTTAYMELKSLQFDDTAVYYCARRDYRFDMGFDYWGQGTTVTVSSASTKGPSVFPLAPCSRSTSESTAALGCLVKDYFPEPVTVSWNSGALTSGVHTFPAVLQSSGLYSLSSVVTVPSSSLGTKTYTCNVDHKPSNTKVDKRVESKYGPPCPPCPAPEFLGGPSVFLFPPKPKDTLMISRTPEVTCVVVDVSQEDPEVQFNWYVDGVEVHNAKTKPREEQFNSTYRVVSVLTVLHQDWLNGKEYKCKVSNKGLPSSIEKTISKAKGQPREPQVYTLPPSQEEMTKNQVSLTCLVKGFYPSDIAVEWESNGQPENNYKTTPPVLDSDGSFFLYSRLTVDKSRWQEGNVFSCSVMHEALHNHYTQKSLSLSLGK

SEQ ID NO: 76 - protein, 463 aa, synthetic construct
  REGION 1..463: note = Permbrolizumab light chain -CD86
EIVLTQSPATLSLSPGERATLSCRASKGVSTSGYSYLHWYQQKPGQAPRLLIYLASYLESGVPARFSGSGSGTDFTLTISSLEPEDFAVYYCQHSRDLPLTFGGGTKVEIKRTVAAPSVFIFPPSDEQLKSGTASVVCLLNNFYPREAKVQWKVDNALQSGNSQESVTEQDSKDSTYSLSSTLTLSKADYEKHKVYACEVTHQGLSSPVTKSFNRGECGGGGSGGGGSGGGGSGGGGSGAPLKIQAYFNETADLPCQFANSQNQSLSELVVFWQDQENLVLNEVYLGKEKFDSVHSKYMGRTSFDSDSWTLRLHNLQIKDKGLYQCIIHHKKPTGMIRIHQMNSELSVLANFSQPEIVPISNITENVYINLTCSSIHGYPEPKKMSVLLRTKNSTIEYDGVMQKSQDNVTELYDVSISLSVSFPDVTSNMTIFCILETDKTRLLSSPFSIELEDPQPPPDHIP

SEQ ID NO: 77 - protein, 349 aa, synthetic construct
  REGION 1..349: note = Permbrolizumab light chain -CD86 IgV
EIVLTQSPATLSLSPGERATLSCRASKGVSTSGYSYLHWYQQKPGQAPRLLIYLASYLESGVPARFSGSGSGTDFTLTISSLEPEDFAVYYCQHSRDLPLTFGGGTKVEIKRTVAAPSVFIFPPSDEQLKSGTASVVCLLNNFYPREAKVQWKVDNALQSGNSQESVTEQDSKDSTYSLSSTLTLSKADYEKHKVYACEVTHQGLSSPVTKSFNRGECGGGGSGGGGSGGGGSGGGGSGAPLKIQAYFNETADLPCQFANSQNQSLSELVVFWQDQENLVLNEVYLGKEKFDSVHSKYMGRTSFDSDSWTLRLHNLQIKDKGLYQCIIHHKKPTGMIRIHQMNSELSVL

SEQ ID NO: 78 - protein, 464 aa, synthetic construct
  REGION 1..464: note = CD86-Permbrolizumab light chain
APLKIQAYFNETADLPCQFANSQNQSLSELVVFWQDQENLVLNEVYLGKEKFDSVHSKYMGRTSFDSDSWTLRLHNLQIKDKGLYQCIIHHKKPTGMIRIHQMNSELSVLANFSQPEIVPISNITENVYINLTCSSIHGYPEPKKMSVLLRTKNSTIEYDGVMQKSQDNVTELYDVSISLSVSFPDVTSNMTIFCILETDKTRLLSSPFSIELEDPQPPPDHIPAGGGGSGGGGSGGGGSGGGGSGEIVLTQSPATLSLSPGERATLSCRASKGVSTSGYSYLHWYQQKPGQAPRLLIYLASYLESGVPARFSGSGSGTDFTLTISSLEPEDFAVYYCQHSRDLPLTFGGGTKVEIKRTVAAPSVFIFPPSDEQLKSGTASVVCLLNNFYPREAKVQWKVDNALQSGNSQESVTEQDSKDSTYSLSSTLTLSKADYEKHKVYACEVTHQGLSSPVTKSFNRGEC

SEQ ID NO: 79 - protein, 350 aa, synthetic construct
  REGION 1..350: note = CD86 IgV-Permbrolizumab light chain
APLKIQAYFNETADLPCQFANSQNQSLSELVVFWQDQENLVLNEVYLGKEKFDSVHSKYMGRTSFDSDSWTLRLHNLQIKDKGLYQCIIHHKKPTGMIRIHQMNSELSVLAGGGGSGGGGSGGGGSGGGGSGEIVLTQSPATLSLSPGERATLSCRASKGVSTSGYSYLHWYQQKPGQAPRLLIYLASYLESGVPARFSGSGSGTDFTLTISSLEPEDFAVYYCQHSRDLPLTFGGGTKVEIKRTVAAPSVFIFPPSDEQLKSGTASVVCLLNNFYPREAKVQWKVDNALQSGNSQESVTEQDSKDSTYSLSSTLTLSKADYEKHKVYACEVTHQGLSSPVTKSFNRGEC

SEQ ID NO: 80 - protein, 685 aa, synthetic construct
  REGION 1..685: note = Nivolumab heavy chain -CD86
QVQLVESGGGVVQPGRSLRLDCKASGITFSNSGMHWVRQAPGKGLEWVAVIWYDGSKRYYADSVKGRFTISRDNSKNTLFLQMNSLRAEDTAVYYCATNDDYWGQGTLVTVSSASTKGPSVFPLAPCSRSTSESTAALGCLVKDYFPEPVTVSWNSGALTSGVHTFPAVLQSSGLYSLSSVVTVPSSSLGTKTYTCNVDHKPSNTKVDKRVESKYGPPCPPCPAPEFLGGPSVFLFPPKPKDTLMISRTPEVTCVVVDVSQEDPEVQFNWYVDGVEVHNAKTKPREEQFNSTYRVVSVLTVLHQDWLNGKEYKCKVSNKGLPSSIEKTISKAKGQPREPQVYTLPPSQEEMTKNQVSLTCLVKGFYPSDIAVEWESNGQPENNYKTTPPVLDSDGSFFLYSRLTVDKSRWQEGNVFSCSVMHEALHNHYTQKSLSLSLGAGGGGSGGGGSGGGGSGGGGSGAPLKIQAYFNETADLPCQFANSQNQSLSELVVFWQDQENLVLNEVYLGKEKFDSVHSKYMGRTSFDSDSWTLRLHNLQIKDKGLYQCIIHHKKPTGMIRIHQMNSELSVLANFSQPEIVPISNITENVYINLTCSSIHGYPEPKKMSVLLRTKNSTIEYDGVMQKSQDNVTELYDVSISLSVSFPDVTSNMTIFCILETDKTRLLSSPFSIELEDPQPPPDHIP

SEQ ID NO: 81 - protein, 571 aa, synthetic construct
  REGION 1..571: note = Nivolumab heavy chain -CD86 IgV
QVQLVESGGGVVQPGRSLRLDCKASGITFSNSGMHWVRQAPGKGLEWVAVIWYDGSKRYYADSVKGRFTISRDNSKNTLFLQMNSLRAEDTAVYYCATNDDYWGQGTLVTVSSASTKGPSVFPLAPCSRSTSESTAALGCLVKDYFPEPVTVSWNSGALTSGVHTFPAVLQSSGLYSLSSVVTVPSSSLGTKTYTCNVDHKPSNTKVDKRVESKYGPPCPPCPAPEFLGGPSVFLFPPKPKDTLMISRTPEVTCVVVDVSQEDPEVQFNWYVDGVEVHNAKTKPREEQFNSTYRVVSVLTVLHQDWLNGKEYKCKVSNKGLPSSIEKTISKAKGQPREPQVYTLPPSQEEMTKNQVSLTCLVKGFYPSDIAVEWESNGQPENNYKTTPPVLDSDGSFFLYSRLTVDKSRWQEGNVFSCSVMHEALHNHYTQKSLSLSLGAGGGGSGGGGSGGGGSGGGGSGAPLKIQAYFNETADLPCQFANSQNQSLSELVVFWQDQENLVLNEVYLGKEKFDSVHSKYMGRTSFDSDSWTLRLHNLQIKDKGLYQCIIHHKKPTGMIRIHQMNSELSVL

SEQ ID NO: 82 - protein, 686 aa, synthetic construct
  REGION 1..686: note = CD86-Nivolumab heavy chain
APLKIQAYFNETADLPCQFANSQNQSLSELVVFWQDQENLVLNEVYLGKEKFDSVHSKYMGRTSFDSDSWTLRLHNLQIKDKGLYQCIIHHKKPTGMIRIHQMNSELSVLANFSQPEIVPISNITENVYINLTCSSIHGYPEPKKMSVLLRTKNSTIEYDGVMQKSQDNVTELYDVSISLSVSFPDVTSNMTIFCILETDKTRLLSSPFSIELEDPQPPPDHIPAGGGGSGGGGSGGGGSGGGGSGQVQLVESGGGVVQPGRSLRLDCKASGITFSNSGMHWVRQAPGKGLEWVAVIWYDGSKRYYADSVKGRFTISRDNSKNTLFLQMNSLRAEDTAVYYCATNDDYWGQGTLVTVSSASTKGPSVFPLAPCSRSTSESTAALGCLVKDYFPEPVTVSWNSGALTSGVHTFPAVLQSSGLYSLSSVVTVPSSSLGTKTYTCNVDHKPSNTKVDKRVESKYGPPCPPCPAPEFLGGPSVFLFPPKPKDTLMISRTPEVTCVVVDVSQEDPEVQFNWYVDGVEVHNAKTKPREEQFNSTYRVVSVLTVLHQDWLNGKEYKCKVSNKGLPSSIEKTISKAKGQPREPQVYTLPPSQEEMTKNQVSLTCLVKGFYPSDIAVEWESNGQPENNYKTTPPVLDSDGSFFLYSRLTVDKSRWQEGNVFSCSVMHEALHNHYTQKSLSLSLGK

SEQ ID NO: 83 - protein, 572 aa, synthetic construct
  REGION 1..572: note = CD86 IgV-Nivolumab heavy chain
APLKIQAYFNETADLPCQFANSQNQSLSELVVFWQDQENLVLNEVYLGKEKFDSVHSKYMGRTSFDSDSWTLRLHNLQIKDKGLYQCIIHHKKPTGMIRIHQMNSELSVLAGGGGSGGGGSGGGGSGGGGSGQVQLVESGGGVVQPGRSLRLDCKASGITFSNSGMHWVRQAPGKGLEWVAVIWYDGSKRYYADSVKGRFTISRDNSKNTLFLQMNSLRAEDTAVYYCATNDDYWGQGTLVTVSSASTKGPSVFPLAPCSRSTSESTAALGCLVKDYFPEPVTVSWNSGALTSGVHTFPAVLQSSGLYSLSSVVTVPSSSLGTKTYTCNVDHKPSNTKVDKRVESKYGPPCPPCPAPEFLGGPSVFLFPPKPKDTLMISRTPEVTCVVVDVSQEDPEVQFNWYVDGVEVHNAKTKPREEQFNSTYRVVSVLTVLHQDWLNGKEYKCKVSNKGLPSSIEKTISKAKGQPREPQVYTLPPSQEEMTKNQVSLTCLVKGFYPSDIAVEWESNGQPENNYKTTPPVLDSDGSFFLYSRLTVDKSRWQEGNVFSCSVMHEALHNHYTQKSLSLSLGK

SEQ ID NO: 84 - protein, 459 aa, synthetic construct
  REGION 1..459: note = Nivolumab light chain -CD86
EIVLTQSPATLSLSPGERATLSCRASQSVSSYLAWYQQKPGQAPRLLIYDASNRATGIPARFSGSGSGTDFTLTISSLEPEDFAVYYCQQSSNWPRTFGQGTKVEIKRTVAAPSVFIFPPSDEQLKSGTASVVCLLNNFYPREAKVQWKVDNALQSGNSQESVTEQDSKDSTYSLSSTLTLSKADYEKHKVYACEVTHQGLSSPVTKSFNRGECGGGGSGGGGSGGGGSGGGGSGAPLKIQAYFNETADLPCQFANSQNQSLSELVVFWQDQENLVLNEVYLGKEKFDSVHSKYMGRTSFDSDSWTLRLHNLQIKDKGLYQCIIHHKKPTGMIRIHQMNSELSVLANFSQPEIVPISNITENVYINLTCSSIHGYPEPKKMSVLLRTKNSTIEYDGVMQKSQDNVTELYDVSISLSVSFPDVTSNMTIFCILETDKTRLLSSPFSIELEDPQPPPDHIP

SEQ ID NO: 85 - protein, 345 aa, synthetic construct
  REGION 1..345: note = Nivolumab light chain -CD86 IgV
EIVLTQSPATLSLSPGERATLSCRASQSVSSYLAWYQQKPGQAPRLLIYDASNRATGIPARFSGSGSGTDFTLTISSLEPEDFAVYYCQQSSNWPRTFGQGTKVEIKRTVAAPSVFIFPPSDEQLKSGTASVVCLLNNFYPREAKVQWKVDNALQSGNSQESVTEQDSKDSTYSLSSTLTLSKADYEKHKVYACEVTHQGLSSPVTKSFNRGECGGGGSGGGGSGGGGSGGGGSGAPLKIQAYFNETADLPCQFANSQNQSLSELVVFWQDQENLVLNEVYLGKEKFDSVHSKYMGRTSFDSDSWTLRLHNLQIKDKGLYQCIIHHKKPTGMIRIHQMNSELSVL

SEQ ID NO: 86 - protein, 460 aa, synthetic construct
  REGION 1..460: note = CD86-Nivolumab light chain
APLKIQAYFNETADLPCQFANSQNQSLSELVVFWQDQENLVLNEVYLGKEKFDSVHSKYMGRTSFDSDSWTLRLHNLQIKDKGLYQCIIHHKKPTGMIRIHQMNSELSVLANFSQPEIVPISNITENVYINLTCSSIHGYPEPKKMSVLLRTKNSTIEYDGVMQKSQDNVTELYDVSISLSVSFPDVTSNMTIFCILETDKTRLLSSPFSIELEDPQPPPDHIPAGGGGSGGGGSGGGGSGGGGSGEIVLTQSPATLSLSPGERATLSCRASQSVSSYLAWYQQKPGQAPRLLIYDASNRATGIPARFSGSGSGTDFTLTISSLEPEDFAVYYCQQSSNWPRTFGQGTKVEIKRTVAAPSVFIFPPSDEQLKSGTASVVCLLNNFYPREAKVQWKVDNALQSGNSQESVTEQDSKDSTYSLSSTLTLSKADYEKHKVYACEVTHQGLSSPVTKSFNRGEC

SEQ ID NO: 87 - protein, 346 aa, synthetic construct
  REGION 1..346: note = CD86 IgV-Nivolumab light chain
APLKIQAYFNETADLPCQFANSQNQSLSELVVFWQDQENLVLNEVYLGKEKFDSVHSKYMGRTSFDSDSWTLRLHNLQIKDKGLYQCIIHHKKPTGMIRIHQMNSELSVLAGGGGSGGGGSGGGGSGGGGSGEIVLTQSPATLSLSPGERATLSCRASQSVSSYLAWYQQKPGQAPRLLIYDASNRATGIPARFSGSGSGTDFTLTISSLEPEDFAVYYCQQSSNWPRTFGQGTKVEIKRTVAAPSVFIFPPSDEQLKSGTASVVCLLNNFYPREAKVQWKVDNALQSGNSQESVTEQDSKDSTYSLSSTLTLSKADYEKHKVYACEVTHQGLSSPVTKSFNRGEC

SEQ ID NO: 88 - protein, 1142 aa, synthetic construct
  REGION 1..1142: note = sugemalimab heavy chain -CD86-LAG3
EVQLLESGGGLVQPGGSLRLSCAASGFTFSSYAMSWVRQAPGKGLEWVSGISGSGGFTYYADSVKGRFTISRDNSKNTLYLQMNSLRAEDTAVYYCAKPPRGYNYGPFDYWGQGTLVTVSSASTKGPSVFPLAPCSRSTSESTAALGCLVKDYFPEPVTVSWNSGALTSGVHTFPAVLQSSGLYSLSSVVTVPSSSLGTKTYTCNVDHKPSNTKVDKRVESKYGPPCPPCPAPEFLGGPSVFLFPPKPKDTLMISRTPEVTCVVVDVSQEDPEVQFNWYVDGVEVHNAKTKPREEQFNSTYRVVSVLTVLHQDWLNGKEYKCKVSNKGLPSSIEKTISKAKGQPREPQVYTLPPSQEEMTKNQVSLTCLVKGFYPSDIAVEWESNGQPENNYKTTPPVLDSDGSFFLYSRLTVDKSRWQEGNVFSCSVMHEALHNHYTQKSLSLSLGAGGGGSGGGGSGGGGSGGGGSGAPLKIQAYFNETADLPCQFANSQNQSLSELVVFWQDQENLVLNEVYLGKEKFDSVHSKYMGRTSFDSDSWTLRLHNLQIKDKGLYQCIIHHKKPTGMIRIHQMNSELSVLANFSQPEIVPISNITENVYINLTCSSIHGYPEPKKMSVLLRTKNSTIEYDGVMQKSQDNVTELYDVSISLSVSFPDVTSNMTIFCILETDKTRLLSSPFSIELEDPQPPPDHIPGGGGSGGGGSGGGGSGGGGSGLQPGAEVPVVWAQEGAPAQLPCSPTIPLQDLSLLRRAGVTWQHQPDSGPPAAAPGHPLAPGPHPAAPSSWGPRPRRYTVLSVGPGGLRSGRLPLQPRVQLDERGRQRGDFSLWLRPARRADAGEYRAAVHLRDRALSCRLRLRLGQASMTASPPGSLRASDWVILNCSFSRPDRPASVHWFRNRGQGRVPVRESPHHHLAESFLFLPQVSPMDSGPWGCILTYRDGFNVSIMYNLTVLGLEPPTPLTVYAGAGSRVGLPCRLPAGVGTRSFLTAKWTPPGGGPDLLVTGDNGDFTLRLEDVSQAQAGTYTCHIHLQEQQLNATVTLAIITVTPKSFGSPGSLGKLLCEVTPVSGQERFVWSSLDTPSQRSFSGPWLEAQEAQLLSQPWQCQLYQGERLLGAAVYFTELSSPGAQRSGRAPGALPAGHL

SEQ ID NO: 89 - protein, 1021 aa, synthetic construct
  REGION 1..1021: note = sugemalimab heavy chain -CD86-LAG3 D1/D2/D3
EVQLLESGGGLVQPGGSLRLSCAASGFTFSSYAMSWVRQAPGKGLEWVSGISGSGGFTYYADSVKGRFTISRDNSKNTLYLQMNSLRAEDTAVYYCAKPPRGYNYGPFDYWGQGTLVTVSSASTKGPSVFPLAPCSRSTSESTAALGCLVKDYFPEPVTVSWNSGALTSGVHTFPAVLQSSGLYSLSSVVTVPSSSLGTKTYTCNVDHKPSNTKVDKRVESKYGPPCPPCPAPEFLGGPSVFLFPPKPKDTLMISRTPEVTCVVVDVSQEDPEVQFNWYVDGVEVHNAKTKPREEQFNSTYRVVSVLTVLHQDWLNGKEYKCKVSNKGLPSSIEKTISKAKGQPREPQVYTLPPSQEEMTKNQVSLTCLVKGFYPSDIAVEWESNGQPENNYKTTPPVLDSDGSFFLYSRLTVDKSRWQEGNVFSCSVMHEALHNHYTQKSLSLSLGAGGGGSGGGGSGGGGSGGGGSGAPLKIQAYFNETADLPCQFANSQNQSLSELVVFWQDQENLVLNEVYLGKEKFDSVHSKYMGRTSFDSDSWTLRLHNLQIKDKGLYQCIIHHKKPTGMIRIHQMNSELSVLANFSQPEIVPISNITENVYINLTCSSIHGYPEPKKMSVLLRTKNSTIEYDGVMQKSQDNVTELYDVSISLSVSFPDVTSNMTIFCILETDKTRLLSSPFSIELEDPQPPPDHIPGGGGSGGGGSGGGGSGGGGSGGAPAQLPCSPTIPLQDLSLLRRAGVTWQHQPDSGPPAAAPGHPLAPGPHPAAPSSWGPRPRRYTVLSVGPGGLRSGRLPLQPRVQLDERGRQRGDFSLWLRPARRADAGEYRAAVHLRDRALSCRLRLRLGQASMTASPPGSLRASDWVILNCSFSRPDRPASVHWFRNRGQGRVPVRESPHHHLAESFLFLPQVSPMDSGPWGCILTYRDGFNVSIMYNLTVLGLEPPTPLTVYAGAGSRVGLPCRLPAGVGTRSFLTAKWTPPGGGPDLLVTGDNGDFTLRLEDVSQAQAGTYTCHIHLQEQQLN

SEQ ID NO: 90 - protein, 930 aa, synthetic construct
  REGION 1..930: note = sugemalimab heavy chain -CD86-LAG3 D1/D2
EVQLLESGGGLVQPGGSLRLSCAASGFTFSSYAMSWVRQAPGKGLEWVSGISGSGGFTYYADSVKGRFTISRDNSKNTLYLQMNSLRAEDTAVYYCAKPPRGYNYGPFDYWGQGTLVTVSSASTKGPSVFPLAPCSRSTSESTAALGCLVKDYFPEPVTVSWNSGALTSGVHTFPAVLQSSGLYSLSSVVTVPSSSLGTKTYTCNVDHKPSNTKVDKRVESKYGPPCPPCPAPEFLGGPSVFLFPPKPKDTLMISRTPEVTCVVVDVSQEDPEVQFNWYVDGVEVHNAKTKPREEQFNSTYRVVSVLTVLHQDWLNGKEYKCKVSNKGLPSSIEKTISKAKGQPREPQVYTLPPSQEEMTKNQVSLTCLVKGFYPSDIAVEWESNGQPENNYKTTPPVLDSDGSFFLYSRLTVDKSRWQEGNVFSCSVMHEALHNHYTQKSLSLSLGAGGGGSGGGGSGGGGSGGGGSGAPLKIQAYFNETADLPCQFANSQNQSLSELVVFWQDQENLVLNEVYLGKEKFDSVHSKYMGRTSFDSDSWTLRLHNLQIKDKGLYQCIIHHKKPTGMIRIHQMNSELSVLANFSQPEIVPISNITENVYINLTCSSIHGYPEPKKMSVLLRTKNSTIEYDGVMQKSQDNVTELYDVSISLSVSFPDVTSNMTIFCILETDKTRLLSSPFSIELEDPQPPPDHIPGGGGSGGGGSGGGGSGGGGSGGAPAQLPCSPTIPLQDLSLLRRAGVTWQHQPDSGPPAAAPGHPLAPGPHPAAPSSWGPRPRRYTVLSVGPGGLRSGRLPLQPRVQLDERGRQRGDFSLWLRPARRADAGEYRAAVHLRDRALSCRLRLRLGQASMTASPPGSLRASDWVILNCSFSRPDRPASVHWFRNRGQGRVPVRESPHHHLAESFLFLPQVSPMDSGPWGCILTYRDGFNVS

SEQ ID NO: 91 - protein, 844 aa, synthetic construct
  REGION 1..844: note = sugemalimab heavy chain -CD86-LAG3 IgD1
EVQLLESGGGLVQPGGSLRLSCAASGFTFSSYAMSWVRQAPGKGLEWVSGISGSGGFTYYADSVKGRFTISRDNSKNTLYLQMNSLRAEDTAVYYCAKPPRGYNYGPFDYWGQGTLVTVSSASTKGPSVFPLAPCSRSTSESTAALGCLVKDYFPEPVTVSWNSGALTSGVHTFPAVLQSSGLYSLSSVVTVPSSSLGTKTYTCNVDHKPSNTKVDKRVESKYGPPCPPCPAPEFLGGPSVFLFPPKPKDTLMISRTPEVTCVVVDVSQEDPEVQFNWYVDGVEVHNAKTKPREEQFNSTYRVVSVLTVLHQDWLNGKEYKCKVSNKGLPSSIEKTISKAKGQPREPQVYTLPPSQEEMTKNQVSLTCLVKGFYPSDIAVEWESNGQPENNYKTTPPVLDSDGSFFLYSRLTVDKSRWQEGNVFSCSVMHEALHNHYTQKSLSLSLGAGGGGSGGGGSGGGGSGGGGSGAPLKIQAYFNETADLPCQFANSQNQSLSELVVFWQDQENLVLNEVYLGKEKFDSVHSKYMGRTSFDSDSWTLRLHNLQIKDKGLYQCIIHHKKPTGMIRIHQMNSELSVLANFSQPEIVPISNITENVYINLTCSSIHGYPEPKKMSVLLRTKNSTIEYDGVMQKSQDNVTELYDVSISLSVSFPDVTSNMTIFCILETDKTRLLSSPFSIELEDPQPPPDHIPGGGGSGGGGSGGGGSGGGGSGAPAQLPCSPTIPLQDLSLLRRAGVTWQHQPDSGPPAAAPGHPLAPGPHPAAPSSWGPRPRRYTVLSVGPGGLRSGRLPLQPRVQLDERGRQRGDFSLWLRPARRADAGEYRAAVHLRDRALSCRLRLRLG

SEQ ID NO: 92 - protein, 1142 aa, synthetic construct
  REGION 1..1142: note = sugemalimab heavy chain -LAG3-CD86
EVQLLESGGGLVQPGGSLRLSCAASGFTFSSYAMSWVRQAPGKGLEWVSGISGSGGFTYYADSVKGRFTISRDNSKNTLYLQMNSLRAEDTAVYYCAKPPRGYNYGPFDYWGQGTLVTVSSASTKGPSVFPLAPCSRSTSESTAALGCLVKDYFPEPVTVSWNSGALTSGVHTFPAVLQSSGLYSLSSVVTVPSSSLGTKTYTCNVDHKPSNTKVDKRVESKYGPPCPPCPAPEFLGGPSVFLFPPKPKDTLMISRTPEVTCVVVDVSQEDPEVQFNWYVDGVEVHNAKTKPREEQFNSTYRVVSVLTVLHQDWLNGKEYKCKVSNKGLPSSIEKTISKAKGQPREPQVYTLPPSQEEMTKNQVSLTCLVKGFYPSDIAVEWESNGQPENNYKTTPPVLDSDGSFFLYSRLTVDKSRWQEGNVFSCSVMHEALHNHYTQKSLSLSLGAGGGGSGGGGSGGGGSGGGGSGLQPGAEVPVVWAQEGAPAQLPCSPTIPLQDLSLLRRAGVTWQHQPDSGPPAAAPGHPLAPGPHPAAPSSWGPRPRRYTVLSVGPGGLRSGRLPLQPRVQLDERGRQRGDFSLWLRPARRADAGEYRAAVHLRDRALSCRLRLRLGQASMTASPPGSLRASDWVILNCSFSRPDRPASVHWFRNRGQGRVPVRESPHHHLAESFLFLPQVSPMDSGPWGCILTYRDGFNVSIMYNLTVLGLEPPTPLTVYAGAGSRVGLPCRLPAGVGTRSFLTAKWTPPGGGPDLLVTGDNGDFTLRLEDVSQAQAGTYTCHIHLQEQQLNATVTLAIITVTPKSFGSPGSLGKLLCEVTPVSGQERFVWSSLDTPSQRSFSGPWLEAQEAQLLSQPWQCQLYQGERLLGAAVYFTELSSPGAQRSGRAPGALPAGHLGGGGSGGGGSGGGGSGGGGSGAPLKIQAYFNETADLPCQFANSQNQSLSELVVFWQDQENLVLNEVYLGKEKFDSVHSKYMGRTSFDSDSWTLRLHNLQIKDKGLYQCIIHHKKPTGMIRIHQMNSELSVLANFSQPEIVPISNITENVYINLTCSSIHGYPEPKKMSVLLRTKNSTIEYDGVMQKSQDNVTELYDVSISLSVSFPDVTSNMTIFCILETDKTRLLSSPFSIELEDPQPPPDHIP

SEQ ID NO: 93 - protein, 1021 aa, synthetic construct
  REGION 1..1021: note = sugemalimab heavy chain -LAG3 D1/D2/D3-CD86
EVQLLESGGGLVQPGGSLRLSCAASGFTFSSYAMSWVRQAPGKGLEWVSGISGSGGFTYYADSVKGRFTISRDNSKNTLYLQMNSLRAEDTAVYYCAKPPRGYNYGPFDYWGQGTLVTVSSASTKGPSVFPLAPCSRSTSESTAALGCLVKDYFPEPVTVSWNSGALTSGVHTFPAVLQSSGLYSLSSVVTVPSSSLGTKTYTCNVDHKPSNTKVDKRVESKYGPPCPPCPAPEFLGGPSVFLFPPKPKDTLMISRTPEVTCVVVDVSQEDPEVQFNWYVDGVEVHNAKTKPREEQFNSTYRVVSVLTVLHQDWLNGKEYKCKVSNKGLPSSIEKTISKAKGQPREPQVYTLPPSQEEMTKNQVSLTCLVKGFYPSDIAVEWESNGQPENNYKTTPPVLDSDGSFFLYSRLTVDKSRWQEGNVFSCSVMHEALHNHYTQKSLSLSLGAGGGGSGGGGSGGGGSGGGGSGGAPAQLPCSPTIPLQDLSLLRRAGVTWQHQPDSGPPAAAPGHPLAPGPHPAAPSSWGPRPRRYTVLSVGPGGLRSGRLPLQPRVQLDERGRQRGDFSLWLRPARRADAGEYRAAVHLRDRALSCRLRLRLGQASMTASPPGSLRASDWVILNCSFSRPDRPASVHWFRNRGQGRVPVRESPHHHLAESFLFLPQVSPMDSGPWGCILTYRDGFNVSIMYNLTVLGLEPPTPLTVYAGAGSRVGLPCRLPAGVGTRSFLTAKWTPPGGGPDLLVTGDNGDFTLRLEDVSQAQAGTYTCHIHLQEQQLNGGGGSGGGGSGGGGSGGGGSGAPLKIQAYFNETADLPCQFANSQNQSLSELVVFWQDQENLVLNEVYLGKEKFDSVHSKYMGRTSFDSDSWTLRLHNLQIKDKGLYQCIIHHKKPTGMIRIHQMNSELSVLANFSQPEIVPISNITENVYINLTCSSIHGYPEPKKMSVLLRTKNSTIEYDGVMQKSQDNVTELYDVSISLSVSFPDVTSNMTIFCILETDKTRLLSSPFSIELEDPQPPPDHIP

SEQ ID NO: 94 - protein, 930 aa, synthetic construct
  REGION 1..930: note = sugemalimab heavy chain -LAG3 D1/D2-CD86
EVQLLESGGGLVQPGGSLRLSCAASGFTFSSYAMSWVRQAPGKGLEWVSGISGSGGFTYYADSVKGRFTISRDNSKNTLYLQMNSLRAEDTAVYYCAKPPRGYNYGPFDYWGQGTLVTVSSASTKGPSVFPLAPCSRSTSESTAALGCLVKDYFPEPVTVSWNSGALTSGVHTFPAVLQSSGLYSLSSVVTVPSSSLGTKTYTCNVDHKPSNTKVDKRVESKYGPPCPPCPAPEFLGGPSVFLFPPKPKDTLMISRTPEVTCVVVDVSQEDPEVQFNWYVDGVEVHNAKTKPREEQFNSTYRVVSVLTVLHQDWLNGKEYKCKVSNKGLPSSIEKTISKAKGQPREPQVYTLPPSQEEMTKNQVSLTCLVKGFYPSDIAVEWESNGQPENNYKTTPPVLDSDGSFFLYSRLTVDKSRWQEGNVFSCSVMHEALHNHYTQKSLSLSLGAGGGGSGGGGSGGGGSGGGGSGGAPAQLPCSPTIPLQDLSLLRRAGVTWQHQPDSGPPAAAPGHPLAPGPHPAAPSSWGPRPRRYTVLSVGPGGLRSGRLPLQPRVQLDERGRQRGDFSLWLRPARRADAGEYRAAVHLRDRALSCRLRLRLGQASMTASPPGSLRASDWVILNCSFSRPDRPASVHWFRNRGQGRVPVRESPHHHLAESFLFLPQVSPMDSGPWGCILTYRDGFNVSGGGGSGGGGSGGGGSGGGGSGAPLKIQAYFNETADLPCQFANSQNQSLSELVVFWQDQENLVLNEVYLGKEKFDSVHSKYMGRTSFDSDSWTLRLHNLQIKDKGLYQCIIHHKKPTGMIRIHQMNSELSVLANFSQPEIVPISNITENVYINLTCSSIHGYPEPKKMSVLLRTKNSTIEYDGVMQKSQDNVTELYDVSISLSVSFPDVTSNMTIFCILETDKTRLLSSPFSIELEDPQPPPDHIP

SEQ ID NO: 95 - protein, 844 aa, synthetic construct
  REGION 1..844: note = sugemalimab heavy chain -LAG3 IgD1-CD86
EVQLLESGGGLVQPGGSLRLSCAASGFTFSSYAMSWVRQAPGKGLEWVSGISGSGGFTYYADSVKGRFTISRDNSKNTLYLQMNSLRAEDTAVYYCAKPPRGYNYGPFDYWGQGTLVTVSSASTKGPSVFPLAPCSRSTSESTAALGCLVKDYFPEPVTVSWNSGALTSGVHTFPAVLQSSGLYSLSSVVTVPSSSLGTKTYTCNVDHKPSNTKVDKRVESKYGPPCPPCPAPEFLGGPSVFLFPPKPKDTLMISRTPEVTCVVVDVSQEDPEVQFNWYVDGVEVHNAKTKPREEQFNSTYRVVSVLTVLHQDWLNGKEYKCKVSNKGLPSSIEKTISKAKGQPREPQVYTLPPSQEEMTKNQVSLTCLVKGFYPSDIAVEWESNGQPENNYKTTPPVLDSDGSFFLYSRLTVDKSRWQEGNVFSCSVMHEALHNHYTQKSLSLSLGAGGGGSGGGGSGGGGSGGGGSGAPAQLPCSPTIPLQDLSLLRRAGVTWQHQPDSGPPAAAPGHPLAPGPHPAAPSSWGPRPRRYTVLSVGPGGLRSGRLPLQPRVQLDERGRQRGDFSLWLRPARRADAGEYRAAVHLRDRALSCRLRLRLGGGGGSGGGGSGGGGSGGGGSGAPLKIQAYFNETADLPCQFANSQNQSLSELVVFWQDQENLVLNEVYLGKEKFDSVHSKYMGRTSFDSDSWTLRLHNLQIKDKGLYQCIIHHKKPTGMIRIHQMNSELSVLANFSQPEIVPISNITENVYINLTCSSIHGYPEPKKMSVLLRTKNSTIEYDGVMQKSQDNVTELYDVSISLSVSFPDVTSNMTIFCILETDKTRLLSSPFSIELEDPQPPPDHIP

SEQ ID NO: 96 - protein, 1028 aa, synthetic construct
  REGION 1..1028: note = sugemalimab heavy chain -CD86 IgV-LAG3
EVQLLESGGGLVQPGGSLRLSCAASGFTFSSYAMSWVRQAPGKGLEWVSGISGSGGFTYYADSVKGRFTISRDNSKNTLYLQMNSLRAEDTAVYYCAKPPRGYNYGPFDYWGQGTLVTVSSASTKGPSVFPLAPCSRSTSESTAALGCLVKDYFPEPVTVSWNSGALTSGVHTFPAVLQSSGLYSLSSVVTVPSSSLGTKTYTCNVDHKPSNTKVDKRVESKYGPPCPPCPAPEFLGGPSVFLFPPKPKDTLMISRTPEVTCVVVDVSQEDPEVQFNWYVDGVEVHNAKTKPREEQFNSTYRVVSVLTVLHQDWLNGKEYKCKVSNKGLPSSIEKTISKAKGQPREPQVYTLPPSQEEMTKNQVSLTCLVKGFYPSDIAVEWESNGQPENNYKTTPPVLDSDGSFFLYSRLTVDKSRWQEGNVFSCSVMHEALHNHYTQKSLSLSLGAGGGGSGGGGSGGGGSGGGGSGAPLKIQAYFNETADLPCQFANSQNQSLSELVVFWQDQENLVLNEVYLGKEKFDSVHSKYMGRTSFDSDSWTLRLHNLQIKDKGLYQCIIHHKKPTGMIRIHQMNSELSVLGGGGSGGGGSGGGGSGGGGSGLQPGAEVPVVWAQEGAPAQLPCSPTIPLQDLSLLRRAGVTWQHQPDSGPPAAAPGHPLAPGPHPAAPSSWGPRPRRYTVLSVGPGGLRSGRLPLQPRVQLDERGRQRGDFSLWLRPARRADAGEYRAAVHLRDRALSCRLRLRLGQASMTASPPGSLRASDWVILNCSFSRPDRPASVHWFRNRGQGRVPVRESPHHHLAESFLFLPQVSPMDSGPWGCILTYRDGFNVSIMYNLTVLGLEPPTPLTVYAGAGSRVGLPCRLPAGVGTRSFLTAKWTPPGGGPDLLVTGDNGDFTLRLEDVSQAQAGTYTCHIHLQEQQLNATVTLAIITVTPKSFGSPGSLGKLLCEVTPVSGQERFVWSSLDTPSQRSFSGPWLEAQEAQLLSQPWQCQLYQGERLLGAAVYFTELSSPGAQRSGRAPGALPAGHL

SEQ ID NO: 97 - protein, 907 aa, synthetic construct
  REGION 1..907: note = sugemalimab heavy chain --CD86 IgV-LAG3 D1/D2/D3
EVQLLESGGGLVQPGGSLRLSCAASGFTFSSYAMSWVRQAPGKGLEWVSGISGSGGFTYYADSVKGRFTISRDNSKNTLYLQMNSLRAEDTAVYYCAKPPRGYNYGPFDYWGQGTLVTVSSASTKGPSVFPLAPCSRSTSESTAALGCLVKDYFPEPVTVSWNSGALTSGVHTFPAVLQSSGLYSLSSVVTVPSSSLGTKTYTCNVDHKPSNTKVDKRVESKYGPPCPPCPAPEFLGGPSVFLFPPKPKDTLMISRTPEVTCVVVDVSQEDPEVQFNWYVDGVEVHNAKTKPREEQFNSTYRVVSVLTVLHQDWLNGKEYKCKVSNKGLPSSIEKTISKAKGQPREPQVYTLPPSQEEMTKNQVSLTCLVKGFYPSDIAVEWESNGQPENNYKTTPPVLDSDGSFFLYSRLTVDKSRWQEGNVFSCSVMHEALHNHYTQKSLSLSLGAGGGGSGGGGSGGGGSGGGGSGAPLKIQAYFNETADLPCQFANSQNQSLSELVVFWQDQENLVLNEVYLGKEKFDSVHSKYMGRTSFDSDSWTLRLHNLQIKDKGLYQCIIHHKKPTGMIRIHQMNSELSVLGGGGSGGGGSGGGGSGGGGSGGAPAQLPCSPTIPLQDLSLLRRAGVTWQHQPDSGPPAAAPGHPLAPGPHPAAPSSWGPRPRRYTVLSVGPGGLRSGRLPLQPRVQLDERGRQRGDFSLWLRPARRADAGEYRAAVHLRDRALSCRLRLRLGQASMTASPPGSLRASDWVILNCSFSRPDRPASVHWFRNRGQGRVPVRESPHHHLAESFLFLPQVSPMDSGPWGCILTYRDGFNVSIMYNLTVLGLEPPTPLTVYAGAGSRVGLPCRLPAGVGTRSFLTAKWTPPGGGPDLLVTGDNGDFTLRLEDVSQAQAGTYTCHIHLQEQQLN

SEQ ID NO: 98 - protein, 816 aa, synthetic construct
  REGION 1..816: note = sugemalimab heavy chain --CD86 IgV-LAG3 D1/D2
EVQLLESGGGLVQPGGSLRLSCAASGFTFSSYAMSWVRQAPGKGLEWVSGISGSGGFTYYADSVKGRFTISRDNSKNTLYLQMNSLRAEDTAVYYCAKPPRGYNYGPFDYWGQGTLVTVSSASTKGPSVFPLAPCSRSTSESTAALGCLVKDYFPEPVTVSWNSGALTSGVHTFPAVLQSSGLYSLSSVVTVPSSSLGTKTYTCNVDHKPSNTKVDKRVESKYGPPCPPCPAPEFLGGPSVFLFPPKPKDTLMISRTPEVTCVVVDVSQEDPEVQFNWYVDGVEVHNAKTKPREEQFNSTYRVVSVLTVLHQDWLNGKEYKCKVSNKGLPSSIEKTISKAKGQPREPQVYTLPPSQEEMTKNQVSLTCLVKGFYPSDIAVEWESNGQPENNYKTTPPVLDSDGSFFLYSRLTVDKSRWQEGNVFSCSVMHEALHNHYTQKSLSLSLGAGGGGSGGGGSGGGGSGGGGSGAPLKIQAYFNETADLPCQFANSQNQSLSELVVFWQDQENLVLNEVYLGKEKFDSVHSKYMGRTSFDSDSWTLRLHNLQIKDKGLYQCIIHHKKPTGMIRIHQMNSELSVLGGGGSGGGGSGGGGSGGGGSGGAPAQLPCSPTIPLQDLSLLRRAGVTWQHQPDSGPPAAAPGHPLAPGPHPAAPSSWGPRPRRYTVLSVGPGGLRSGRLPLQPRVQLDERGRQRGDFSLWLRPARRADAGEYRAAVHLRDRALSCRLRLRLGQASMTASPPGSLRASDWVILNCSFSRPDRPASVHWFRNRGQGRVPVRESPHHHLAESFLFLPQVSPMDSGPWGCILTYRDGFNVS

SEQ ID NO: 99 - protein, 729 aa, synthetic construct
  REGION 1..729: note = sugemalimab heavy chain --CD86 IgV-LAG3 IgD1
EVQLLESGGGLVQPGGSLRLSCAASGFTFSSYAMSWVRQAPGKGLEWVSGISGSGGFTYYADSVKGRFTISRDNSKNTLYLQMNSLRAEDTAVYYCAKPPRGYNYGPFDYWGQGTLVTVSSASTKGPSVFPLAPCSRSTSESTAALGCLVKDYFPEPVTVSWNSGALTSGVHTFPAVLQSSGLYSLSSVVTVPSSSLGTKTYTCNVDHKPSNTKVDKRVESKYGPPCPPCPAPEFLGGPSVFLFPPKPKDTLMISRTPEVTCVVVDVSQEDPEVQFNWYVDGVEVHNAKTKPREEQFNSTYRVVSVLTVLHQDWLNGKEYKCKVSNKGLPSSIEKTISKAKGQPREPQVYTLPPSQEEMTKNQVSLTCLVKGFYPSDIAVEWESNGQPENNYKTTPPVLDSDGSFFLYSRLTVDKSRWQEGNVFSCSVMHEALHNHYTQKSLSLSLGAGGGGSGGGGSGGGGSGGGGSAPLKIQAYFNETADLPCQFANSQNQSLSELVVFWQDQENLVLNEVYLGKEKFDSVHSKYMGRTSFDSDSWTLRLHNLQIKDKGLYQCIIHHKKPTGMIRIHQMNSELSVLGGGGSGGGGSGGGGSGGGGSGAPAQLPCSPTIPLQDLSLLRRAGVTWQHQPDSGPPAAAPGHPLAPGPHPAAPSSWGPRPRRYTVLSVGPGGLRSGRLPLQPRVQLDERGRQRGDFSLWLRPARRADAGEYRAAVHLRDRALSCRLRLRLG

SEQ ID NO: 100 - protein, 1028 aa, synthetic construct
  REGION 1..1028: note = sugemalimab heavy chain -LAG3-CD86 IgV
EVQLLESGGGLVQPGGSLRLSCAASGFTFSSYAMSWVRQAPGKGLEWVSGISGSGGFTYYADSVKGRFTISRDNSKNTLYLQMNSLRAEDTAVYYCAKPPRGYNYGPFDYWGQGTLVTVSSASTKGPSVFPLAPCSRSTSESTAALGCLVKDYFPEPVTVSWNSGALTSGVHTFPAVLQSSGLYSLSSVVTVPSSSLGTKTYTCNVDHKPSNTKVDKRVESKYGPPCPPCPAPEFLGGPSVFLFPPKPKDTLMISRTPEVTCVVVDVSQEDPEVQFNWYVDGVEVHNAKTKPREEQFNSTYRVVSVLTVLHQDWLNGKEYKCKVSNKGLPSSIEKTISKAKGQPREPQVYTLPPSQEEMTKNQVSLTCLVKGFYPSDIAVEWESNGQPENNYKTTPPVLDSDGSFFLYSRLTVDKSRWQEGNVFSCSVMHEALHNHYTQKSLSLSLGAGGGGSGGGGSGGGGSGGGGSGLQPGAEVPVVWAQEGAPAQLPCSPTIPLQDLSLLRRAGVTWQHQPDSGPPAAAPGHPLAPGPHPAAPSSWGPRPRRYTVLSVGPGGLRSGRLPLQPRVQLDERGRQRGDFSLWLRPARRADAGEYRAAVHLRDRALSCRLRLRLGQASMTASPPGSLRASDWVILNCSFSRPDRPASVHWFRNRGQGRVPVRESPHHHLAESFLFLPQVSPMDSGPWGCILTYRDGFNVSIMYNLTVLGLEPPTPLTVYAGAGSRVGLPCRLPAGVGTRSFLTAKWTPPGGGPDLLVTGDNGDFTLRLEDVSQAQAGTYTCHIHLQEQQLNATVTLAIITVTPKSFGSPGSLGKLLCEVTPVSGQERFVWSSLDTPSQRSFSGPWLEAQEAQLLSQPWQCQLYQGERLLGAAVYFTELSSPGAQRSGRAPGALPAGHLGGGGSGGGGSGGGGSGGGGSGAPLKIQAYFNETADLPCQFANSQNQSLSELVVFWQDQENLVLNEVYLGKEKFDSVHSKYMGRTSFDSDSWTLRLHNLQIKDKGLYQCIIHHKKPTGMIRIHQMNSELSVL

SEQ ID NO: 101 - protein, 907 aa, synthetic construct
  REGION 1..907: note = sugemalimab heavy chain -LAG3 D1/D2/D3-CD86 IgV
EVQLLESGGGLVQPGGSLRLSCAASGFTFSSYAMSWVRQAPGKGLEWVSGISGSGGFTYYADSVKGRFTISRDNSKNTLYLQMNSLRAEDTAVYYCAKPPRGYNYGPFDYWGQGTLVTVSSASTKGPSVFPLAPCSRSTSESTAALGCLVKDYFPEPVTVSWNSGALTSGVHTFPAVLQSSGLYSLSSVVTVPSSSLGTKTYTCNVDHKPSNTKVDKRVESKYGPPCPPCPAPEFLGGPSVFLFPPKPKDTLMISRTPEVTCVVVDVSQEDPEVQFNWYVDGVEVHNAKTKPREEQFNSTYRVVSVLTVLHQDWLNGKEYKCKVSNKGLPSSIEKTISKAKGQPREPQVYTLPPSQEEMTKNQVSLTCLVKGFYPSDIAVEWESNGQPENNYKTTPPVLDSDGSFFLYSRLTVDKSRWQEGNVFSCSVMHEALHNHYTQKSLSLSLGAGGGGSGGGGSGGGGSGGGGSGGAPAQLPCSPTIPLQDLSLLRRAGVTWQHQPDSGPPAAAPGHPLAPGPHPAAPSSWGPRPRRYTVLSVGPGGLRSGRLPLQPRVQLDERGRQRGDFSLWLRPARRADAGEYRAAVHLRDRALSCRLRLRLGQASMTASPPGSLRASDWVILNCSFSRPDRPASVHWFRNRGQGRVPVRESPHHHLAESFLFLPQVSPMDSGPWGCILTYRDGFNVSIMYNLTVLGLEPPTPLTVYAGAGSRVGLPCRLPAGVGTRSFLTAKWTPPGGGPDLLVTGDNGDFTLRLEDVSQAQAGTYTCHIHLQEQQLNGGGGSGGGGSGGGGSGGGGSGAPLKIQAYFNETADLPCQFANSQNQSLSELVVFWQDQENLVLNEVYLGKEKFDSVHSKYMGRTSFDSDSWTLRLHNLQIKDKGLYQCIIHHKKPTGMIRIHQMNSELSVL

SEQ ID NO: 102 - protein, 816 aa, synthetic construct
  REGION 1..816: note = sugemalimab heavy chain -LAG3 D1/D2-CD86 IgV
EVQLLESGGGLVQPGGSLRLSCAASGFTFSSYAMSWVRQAPGKGLEWVSGISGSGGFTYYADSVKGRFTISRDNSKNTLYLQMNSLRAEDTAVYYCAKPPRGYNYGPFDYWGQGTLVTVSSASTKGPSVFPLAPCSRSTSESTAALGCLVKDYFPEPVTVSWNSGALTSGVHTFPAVLQSSGLYSLSSVVTVPSSSLGTKTYTCNVDHKPSNTKVDKRVESKYGPPCPPCPAPEFLGGPSVFLFPPKPKDTLMISRTPEVTCVVVDVSQEDPEVQFNWYVDGVEVHNAKTKPREEQFNSTYRVVSVLTVLHQDWLNGKEYKCKVSNKGLPSSIEKTISKAKGQPREPQVYTLPPSQEEMTKNQVSLTCLVKGFYPSDIAVEWESNGQPENNYKTTPPVLDSDGSFFLYSRLTVDKSRWQEGNVFSCSVMHEALHNHYTQKSLSLSLGAGGGGSGGGGSGGGGSGGGGSGGAPAQLPCSPTIPLQDLSLLRRAGVTWQHQPDSGPPAAAPGHPLAPGPHPAAPSSWGPRPRRYTVLSVGPGGLRSGRLPLQPRVQLDERGRQRGDFSLWLRPARRADAGEYRAAVHLRDRALSCRLRLRLGQASMTASPPGSLRASDWVILNCSFSRPDRPASVHWFRNRGQGRVPVRESPHHHLAESFLFLPQVSPMDSGPWGCILTYRDGFNVSGGGGSGGGGSGGGGSGGGGSGAPLKIQAYFNETADLPCQFANSQNQSLSELVVFWQDQENLVLNEVYLGKEKFDSVHSKYMGRTSFDSDSWTLRLHNLQIKDKGLYQCIIHHKKPTGMIRIHQMNSELSVL

SEQ ID NO: 103 - protein, 730 aa, synthetic construct
  REGION 1..730: note = sugemalimab heavy chain -LAG3 IgD1-CD86 IgV
EVQLLESGGGLVQPGGSLRLSCAASGFTFSSYAMSWVRQAPGKGLEWVSGISGSGGFTYYADSVKGRFTISRDNSKNTLYLQMNSLRAEDTAVYYCAKPPRGYNYGPFDYWGQGTLVTVSSASTKGPSVFPLAPCSRSTSESTAALGCLVKDYFPEPVTVSWNSGALTSGVHTFPAVLQSSGLYSLSSVVTVPSSSLGTKTYTCNVDHKPSNTKVDKRVESKYGPPCPPCPAPEFLGGPSVFLFPPKPKDTLMISRTPEVTCVVVDVSQEDPEVQFNWYVDGVEVHNAKTKPREEQFNSTYRVVSVLTVLHQDWLNGKEYKCKVSNKGLPSSIEKTISKAKGQPREPQVYTLPPSQEEMTKNQVSLTCLVKGFYPSDIAVEWESNGQPENNYKTTPPVLDSDGSFFLYSRLTVDKSRWQEGNVFSCSVMHEALHNHYTQKSLSLSLGAGGGGSGGGGSGGGGSGGGGSGAPAQLPCSPTIPLQDLSLLRRAGVTWQHQPDSGPPAAAPGHPLAPGPHPAAPSSWGPRPRRYTVLSVGPGGLRSGRLPLQPRVQLDERGRQRGDFSLWLRPARRADAGEYRAAVHLRDRALSCRLRLRLGGGGGSGGGGSGGGGSGGGGSGAPLKIQAYFNETADLPCQFANSQNQSLSELVVFWQDQENLVLNEVYLGKEKFDSVHSKYMGRTSFDSDSWTLRLHNLQIKDKGLYQCIIHHKKPTGMIRIHQMNSELSVL

SEQ ID NO: 104 - protein, 1144 aa, synthetic construct
  REGION 1..1144: note = CD86-sugemalimab heavy chain -LAG3
APLKIQAYFNETADLPCQFANSQNQSLSELVVFWQDQENLVLNEVYLGKEKFDSVHSKYMGRTSFDSDSWTLRLHNLQIKDKGLYQCIIHHKKPTGMIRIHQMNSELSVLANFSQPEIVPISNITENVYINLTCSSIHGYPEPKKMSVLLRTKNSTIEYDGVMQKSQDNVTELYDVSISLSVSFPDVTSNMTIFCILETDKTRLLSSPFSIELEDPQPPPDHIPAGGGGSGGGGSGGGGSGGGGSGEVQLLESGGGLVQPGGSLRLSCAASGFTFSSYAMSWVRQAPGKGLEWVSGISGSGGFTYYADSVKGRFTISRDNSKNTLYLQMNSLRAEDTAVYYCAKPPRGYNYGPFDYWGQGTLVTVSSASTKGPSVFPLAPCSRSTSESTAALGCLVKDYFPEPVTVSWNSGALTSGVHTFPAVLQSSGLYSLSSVVTVPSSSLGTKTYTCNVDHKPSNTKVDKRVESKYGPPCPPCPAPEFLGGPSVFLFPPKPKDTLMISRTPEVTCVVVDVSQEDPEVQFNWYVDGVEVHNAKTKPREEQFNSTYRVVSVLTVLHQDWLNGKEYKCKVSNKGLPSSIEKTISKAKGQPREPQVYTLPPSQEEMTKNQVSLTCLVKGFYPSDIAVEWESNGQPENNYKTTPPVLDSDGSFFLYSRLTVDKSRWQEGNVFSCSVMHEALHNHYTQKSLSLSLGAGGGGGSGGGGSGGGGSGGGGSGLQPGAEVPVVWAQEGAPAQLPCSPTIPLQDLSLLRRAGVTWQHQPDSGPPAAAPGHPLAPGPHPAAPSSWGPRPRRYTVLSVGPGGLRSGRLPLQPRVQLDERGRQRGDFSLWLRPARRADAGEYRAAVHLRDRALSCRLRLRLGQASMTASPPGSLRASDWVILNCSFSRPDRPASVHWFRNRGQGRVPVRESPHHHLAESFLFLPQVSPMDSGPWGCILTYRDGFNVSIMYNLTVLGLEPPTPLTVYAGAGSRVGLPCRLPAGVGTRSFLTAKWTPPGGGPDLLVTGDNGDFTLRLEDVSQAQAGTYTCHIHLQEQQLNATVTLAIITVTPKSFGSPGSLGKLLCEVTPVSGQERFVWSSLDTPSQRSFSGPWLEAQEAQLLSQPWQCQLYQGERLLGAAVYFTELSSPGAQRSGRAPGALPAGHL

SEQ ID NO: 105 - protein, 1023 aa, synthetic construct
  REGION 1..1023: note = CD86-sugemalimab heavy chain -LAG3 D1/D2/D3
APLKIQAYFNETADLPCQFANSQNQSLSELVVFWQDQENLVLNEVYLGKEKFDSVHSKYMGRTSFDSDSWTLRLHNLQIKDKGLYQCIIHHKKPTGMIRIHQMNSELSVLANFSQPEIVPISNITENVYINLTCSSIHGYPEPKKMSVLLRTKNSTIEYDGVMQKSQDNVTELYDVSISLSVSFPDVTSNMTIFCILETDKTRLLSSPFSIELEDPQPPPDHIPAGGGGSGGGGSGGGGSGGGGSGEVQLLESGGGLVQPGGSLRLSCAASGFTFSSYAMSWVRQAPGKGLEWVSGISGSGGFTYYADSVKGRFTISRDNSKNTLYLQMNSLRAEDTAVYYCAKPPRGYNYGPFDYWGQGTLVTVSSASTKGPSVFPLAPCSRSTSESTAALGCLVKDYFPEPVTVSWNSGALTSGVHTFPAVLQSSGLYSLSSVVTVPSSSLGTKTYTCNVDHKPSNTKVDKRVESKYGPPCPPCPAPEFLGGPSVFLFPPKPKDTLMISRTPEVTCVVVDVSQEDPEVQFNWYVDGVEVHNAKTKPREEQFNSTYRVVSVLTVLHQDWLNGKEYKCKVSNKGLPSSIEKTISKAKGQPREPQVYTLPPSQEEMTKNQVSLTCLVKGFYPSDIAVEWESNGQPENNYKTTPPVLDSDGSFFLYSRLTVDKSRWQEGNVFSCSVMHEALHNHYTQKSLSLSLGAGGGGGSGGGGSGGGGSGGGGSGGAPAQLPCSPTIPLQDLSLLRRAGVTWQHQPDSGPPAAAPGHPLAPGPHPAAPSSWGPRPRRYTVLSVGPGGLRSGRLPLQPRVQLDERGRQRGDFSLWLRPARRADAGEYRAAVHLRDRALSCRLRLRLGQASMTASPPGSLRASDWVILNCSFSRPDRPASVHWFRNRGQGRVPVRESPHHHLAESFLFLPQVSPMDSGPWGCILTYRDGFNVSIMYNLTVLGLEPPTPLTVYAGAGSRVGLPCRLPAGVGTRSFLTAKWTPPGGGPDLLVTGDNGDFTLRLEDVSQAQAGTYTCHIHLQEQQLN

SEQ ID NO: 106 - protein, 932 aa, synthetic construct
  REGION 1..932: note = CD86-sugemalimab heavy chain -LAG3 D1/D2
APLKIQAYFNETADLPCQFANSQNQSLSELVVFWQDQENLVLNEVYLGKEKFDSVHSKYMGRTSFDSDSWTLRLHNLQIKDKGLYQCIIHHKKPTGMIRIHQMNSELSVLANFSQPEIVPISNITENVYINLTCSSIHGYPEPKKMSVLLRTKNSTIEYDGVMQKSQDNVTELYDVSISLSVSFPDVTSNMTIFCILETDKTRLLSSPFSIELEDPQPPPDHIPAGGGGSGGGGSGGGGSGGGGSGEVQLLESGGGLVQPGGSLRLSCAASGFTFSSYAMSWVRQAPGKGLEWVSGISGSGGFTYYADSVKGRFTISRDNSKNTLYLQMNSLRAEDTAVYYCAKPPRGYNYGPFDYWGQGTLVTVSSASTKGPSVFPLAPCSRSTSESTAALGCLVKDYFPEPVTVSWNSGALTSGVHTFPAVLQSSGLYSLSSVVTVPSSSLGTKTYTCNVDHKPSNTKVDKRVESKYGPPCPPCPAPEFLGGPSVFLFPPKPKDTLMISRTPEVTCVVVDVSQEDPEVQFNWYVDGVEVHNAKTKPREEQFNSTYRVVSVLTVLHQDWLNGKEYKCKVSNKGLPSSIEKTISKAKGQPREPQVYTLPPSQEEMTKNQVSLTCLVKGFYPSDIAVEWESNGQPENNYKTTPPVLDSDGSFFLYSRLTVDKSRWQEGNVFSCSVMHEALHNHYTQKSLSLSLGAGGGGGSGGGGSGGGGSGGGGSGGAPAQLPCSPTIPLQDLSLLRRAGVTWQHQPDSGPPAAAPGHPLAPGPHPAAPSSWGPRPRRYTVLSVGPGGLRSGRLPLQPRVQLDERGRQRGDFSLWLRPARRADAGEYRAAVHLRDRALSCRLRLRLGQASMTASPPGSLRASDWVILNCSFSRPDRPASVHWFRNRGQGRVPVRESPHHHLAESFLFLPQVSPMDSGPWGCILTYRDGFNVS

SEQ ID NO: 107 - protein, 847 aa, synthetic construct
  REGION 1..847: note = CD86-sugemalimab heavy chain -LAG3 IgD1
APLKIQAYFNETADLPCQFANSQNQSLSELVVFWQDQENLVLNEVYLGKEKFDSVHSKYMGRTSFDSDSWTLRLHNLQIKDKGLYQCIIHHKKPTGMIRIHQMNSELSVLANFSQPEIVPISNITENVYINLTCSSIHGYPEPKKMSVLLRTKNSTIEYDGVMQKSQDNVTELYDVSISLSVSFPDVTSNMTIFCILETDKTRLLSSPFSIELEDPQPPPDHIPAGGGGSGGGGSGGGGSGGGGSGEVQLLESGGGLVQPGGSLRLSCAASGFTFSSYAMSWVRQAPGKGLEWVSGISGSGGFTYYADSVKGRFTISRDNSKNTLYLQMNSLRAEDTAVYYCAKPPRGYNYGPFDYWGQGTLVTVSSASTKGPSVFPLAPCSRSTSESTAALGCLVKDYFPEPVTVSWNSGALTSGVHTFPAVLQSSGLYSLSSVVTVPSSSLGTKTYTCNVDHKPSNTKVDKRVESKYGPPCPPCPAPEFLGGPSVFLFPPKPKDTLMISRTPEVTCVVVDVSQEDPEVQFNWYVDGVEVHNAKTKPREEQFNSTYRVVSVLTVLHQDWLNGKEYKCKVSNKGLPSSIEKTISKAKGQPREPQVYTLPPSQEEMTKNQVSLTCLVKGFYPSDIAVEWESNGQPENNYKTTPPVLDSDGSFFLYSRLTVDKSRWQEGNVFSCSVMHEALHNHYTQKSLSLSLGAGGGGGSGGGGSGGGGSGGGGSGGAPAQLPCSPTIPLQDLSLLRRAGVTWQHQPDSGPPAAAPGHPLAPGPHPAAPSSWGPRPRRYTVLSVGPGGLRSGRLPLQPRVQLDERGRQRGDFSLWLRPARRADAGEYRAAVHLRDRALSCRLRLRLG

SEQ ID NO: 108 - protein, 1145 aa, synthetic construct
  REGION 1..1145: note = LAG3-sugemalimab heavy chain -CD86
LQPGAEVPVVWAQEGAPAQLPCSPTIPLQDLSLLRRAGVTWQHQPDSGPPAAAPGHPLAPGPHPAAPSSWGPRPRRYTVLSVGPGGLRSGRLPLQPRVQLDERGRQRGDFSLWLRPARRADAGEYRAAVHLRDRALSCRLRLRLGQASMTASPPGSLRASDWVILNCSFSRPDRPASVHWFRNRGQGRVPVRESPHHHLAESFLFLPQVSPMDSGPWGCILTYRDGFNVSIMYNLTVLGLEPPTPLTVYAGAGSRVGLPCRLPAGVGTRSFLTAKWTPPGGGPDLLVTGDNGDFTLRLEDVSQAQAGTYTCHIHLQEQQLNATVTLAIITVTPKSFGSPGSLGKLLCEVTPVSGQERFVWSSLDTPSQRSFSGPWLEAQEAQLLSQPWQCQLYQGERLLGAAVYFTELSSPGAQRSGRAPGALPAGHLGGGGGSGGGGSGGGGSGGGGSGEVQLLESGGGLVQPGGSLRLSCAASGFTFSSYAMSWVRQAPGKGLEWVSGISGSGGFTYYADSVKGRFTISRDNSKNTLYLQMNSLRAEDTAVYYCAKPPRGYNYGPFDYWGQGTLVTVSSASTKGPSVFPLAPCSRSTSESTAALGCLVKDYFPEPVTVSWNSGALTSGVHTFPAVLQSSGLYSLSSVVTVPSSSLGTKTYTCNVDHKPSNTKVDKRVESKYGPPCPPCPAPEFLGGPSVFLFPPKPKDTLMISRTPEVTCVVVDVSQEDPEVQFNWYVDGVEVHNAKTKPREEQFNSTYRVVSVLTVLHQDWLNGKEYKCKVSNKGLPSSIEKTISKAKGQPREPQVYTLPPSQEEMTKNQVSLTCLVKGFYPSDIAVEWESNGQPENNYKTTPPVLDSDGSFFLYSRLTVDKSRWQEGNVFSCSVMHEALHNHYTQKSLSLSLGAGGGGGSGGGGSGGGGSGGGGSGAPLKIQAYFNETADLPCQFANSQNQSLSELVVFWQDQENLVLNEVYLGKEKFDSVHSKYMGRTSFDSDSWTLRLHNLQIKDKGLYQCIIHHKKPTGMIRIHQMNSELSVLANFSQPEIVPISNITENVYINLTCSSIHGYPEPKKMSVLLRTKNSTIEYDGVMQKSQDNVTELYDVSISLSVSFPDVTSNMTIFCILETDKTRLLSSPFSIELEDPQPPPDHIPA

SEQ ID NO: 109 - protein, 1024 aa, synthetic construct
  REGION 1..1024: note = LAG3 D1/D2/D3-sugemalimab heavy chain -CD86
GAPAQLPCSPTIPLQDLSLLRRAGVTWQHQPDSGPPAAAPGHPLAPGPHPAAPSSWGPRPRRYTVLSVGPGGLRSGRLPLQPRVQLDERGRQRGDFSLWLRPARRADAGEYRAAVHLRDRALSCRLRLRLGQASMTASPPGSLRASDWVILNCSFSRPDRPASVHWFRNRGQGRVPVRESPHHHLAESFLFLPQVSPMDSGPWGCILTYRDGFNVSIMYNLTVLGLEPPTPLTVYAGAGSRVGLPCRLPAGVGTRSFLTAKWTPPGGGPDLLVTGDNGDFTLRLEDVSQAQAGTYTCHIHLQEQQLNGGGGGSGGGGSGGGGSGGGGSGEVQLLESGGGLVQPGGSLRLSCAASGFTFSSYAMSWVRQAPGKGLEWVSGISGSGGFTYYADSVKGRFTISRDNSKNTLYLQMNSLRAEDTAVYYCAKPPRGYNYGPFDYWGQGTLVTVSSASTKGPSVFPLAPCSRSTSESTAALGCLVKDYFPEPVTVSWNSGALTSGVHTFPAVLQSSGLYSLSSVVTVPSSSLGTKTYTCNVDHKPSNTKVDKRVESKYGPPCPPCPAPEFLGGPSVFLFPPKPKDTLMISRTPEVTCVVVDVSQEDPEVQFNWYVDGVEVHNAKTKPREEQFNSTYRVVSVLTVLHQDWLNGKEYKCKVSNKGLPSSIEKTISKAKGQPREPQVYTLPPSQEEMTKNQVSLTCLVKGFYPSDIAVEWESNGQPENNYKTTPPVLDSDGSFFLYSRLTVDKSRWQEGNVFSCSVMHEALHNHYTQKSLSLSLGAGGGGGSGGGGSGGGGSGGGGSGAPLKIQAYFNETADLPCQFANSQNQSLSELVVFWQDQENLVLNEVYLGKEKFDSVHSKYMGRTSFDSDSWTLRLHNLQIKDKGLYQCIIHHKKPTGMIRIHQMNSELSVLANFSQPEIVPISNITENVYINLTCSSIHGYPEPKKMSVLLRTKNSTIEYDGVMQKSQDNVTELYDVSISLSVSFPDVTSNMTIFCILETDKTRLLSSPFSIELEDPQPPPDHIPA

SEQ ID NO: 110 - protein, 933 aa, synthetic construct
  REGION 1..933: note = LAG3 D1/D2-sugemalimab heavy chain -CD86
GAPAQLPCSPTIPLQDLSLLRRAGVTWQHQPDSGPPAAAPGHPLAPGPHPAAPSSWGPRPRRYTVLSVGPGGLRSGRLPLQPRVQLDERGRQRGDFSLWLRPARRADAGEYRAAVHLRDRALSCRLRLRLGQASMTASPPGSLRASDWVILNCSFSRPDRPASVHWFRNRGQGRVPVRESPHHHLAESFLFLPQVSPMDSGPWGCILTYRDGFNVSGGGGGSGGGGSGGGGSGGGGSGEVQLLESGGGLVQPGGSLRLSCAASGFTFSSYAMSWVRQAPGKGLEWVSGISGSGGFTYYADSVKGRFTISRDNSKNTLYLQMNSLRAEDTAVYYCAKPPRGYNYGPFDYWGQGTLVTVSSASTKGPSVFPLAPCSRSTSESTAALGCLVKDYFPEPVTVSWNSGALTSGVHTFPAVLQSSGLYSLSSVVTVPSSSLGTKTYTCNVDHKPSNTKVDKRVESKYGPPCPPCPAPEFLGGPSVFLFPPKPKDTLMISRTPEVTCVVVDVSQEDPEVQFNWYVDGVEVHNAKTKPREEQFNSTYRVVSVLTVLHQDWLNGKEYKCKVSNKGLPSSIEKTISKAKGQPREPQVYTLPPSQEEMTKNQVSLTCLVKGFYPSDIAVEWESNGQPENNYKTTPPVLDSDGSFFLYSRLTVDKSRWQEGNVFSCSVMHEALHNHYTQKSLSLSLGAGGGGGSGGGGSGGGGSGGGGSGAPLKIQAYFNETADLPCQFANSQNQSLSELVVFWQDQENLVLNEVYLGKEKFDSVHSKYMGRTSFDSDSWTLRLHNLQIKDKGLYQCIIHHKKPTGMIRIHQMNSELSVLANFSQPEIVPISNITENVYINLTCSSIHGYPEPKKMSVLLRTKNSTIEYDGVMQKSQDNVTELYDVSISLSVSFPDVTSNMTIFCILETDKTRLLSSPFSIELEDPQPPPDHIPA

SEQ ID NO: 111 - protein, 848 aa, synthetic construct
  REGION 1..848: note = LAG3 IgD1-sugemalimab heavy chain -CD86
GAPAQLPCSPTIPLQDLSLLRRAGVTWQHQPDSGPPAAAPGHPLAPGPHPAAPSSWGPRPRRYTVLSVGPGGLRSGRLPLQPRVQLDERGRQRGDFSLWLRPARRADAGEYRAAVHLRDRALSCRLRLRLGGGGGGSGGGGSGGGGSGGGGSGEVQLLESGGGLVQPGGSLRLSCAASGFTFSSYAMSWVRQAPGKGLEWVSGISGSGGFTYYADSVKGRFTISRDNSKNTLYLQMNSLRAEDTAVYYCAKPPRGYNYGPFDYWGQGTLVTVSSASTKGPSVFPLAPCSRSTSESTAALGCLVKDYFPEPVTVSWNSGALTSGVHTFPAVLQSSGLYSLSSVVTVPSSSLGTKTYTCNVDHKPSNTKVDKRVESKYGPPCPPCPAPEFLGGPSVFLFPPKPKDTLMISRTPEVTCVVVDVSQEDPEVQFNWYVDGVEVHNAKTKPREEQFNSTYRVVSVLTVLHQDWLNGKEYKCKVSNKGLPSSIEKTISKAKGQPREPQVYTLPPSQEEMTKNQVSLTCLVKGFYPSDIAVEWESNGQPENNYKTTPPVLDSDGSFFLYSRLTVDKSRWQEGNVFSCSVMHEALHNHYTQKSLSLSLGAGGGGGSGGGGSGGGGSGGGGSGAPLKIQAYFNETADLPCQFANSQNQSLSELVVFWQDQENLVLNEVYLGKEKFDSVHSKYMGRTSFDSDSWTLRLHNLQIKDKGLYQCIIHHKKPTGMIRIHQMNSELSVLANFSQPEIVPISNITENVYINLTCSSIHGYPEPKKMSVLLRTKNSTIEYDGVMQKSQDNVTELYDVSISLSVSFPDVTSNMTIFCILETDKTRLLSSPFSIELEDPQPPPDHIPA

SEQ ID NO: 112 - protein, 1029 aa, synthetic construct
  REGION 1..1029: note = CD86 IgV-sugemalimab heavy chain -LAG3
APLKIQAYFNETADLPCQFANSQNQSLSELVVFWQDQENLVLNEVYLGKEKFDSVHSKYMGRTSFDSDSWTLRLHNLQIKDKGLYQCIIHHKKPTGMIRIHQMNSELSVLGGGGSGGGGSGGGGSGGGGSGEVQLLESGGGLVQPGGSLRLSCAASGFTFSSYAMSWVRQAPGKGLEWVSGISGSGGFTYYADSVKGRFTISRDNSKNTLYLQMNSLRAEDTAVYYCAKPPRGYNYGPFDYWGQGTLVTVSSASTKGPSVFPLAPCSRSTSESTAALGCLVKDYFPEPVTVSWNSGALTSGVHTFPAVLQSSGLYSLSSVVTVPSSSLGTKTYTCNVDHKPSNTKVDKRVESKYGPPCPPCPAPEFLGGPSVFLFPPKPKDTLMISRTPEVTCVVVDVSQEDPEVQFNWYVDGVEVHNAKTKPREEQFNSTYRVVSVLTVLHQDWLNGKEYKCKVSNKGLPSSIEKTISKAKGQPREPQVYTLPPSQEEMTKNQVSLTCLVKGFYPSDIAVEWESNGQPENNYKTTPPVLDSDGSFFLYSRLTVDKSRWQEGNVFSCSVMHEALHNHYTQKSLSLSLGAGGGGGSGGGGSGGGGSGGGGSGLQPGAEVPVVWAQEGAPAQLPCSPTIPLQDLSLLRRAGVTWQHQPDSGPPAAAPGHPLAPGPHPAAPSSWGPRPRRYTVLSVGPGGLRSGRLPLQPRVQLDERGRQRGDFSLWLRPARRADAGEYRAAVHLRDRALSCRLRLRLGQASMTASPPGSLRASDWVILNCSFSRPDRPASVHWFRNRGQGRVPVRESPHHHLAESFLFLPQVSPMDSGPWGCILTYRDGFNVSIMYNLTVLGLEPPTPLTVYAGAGSRVGLPCRLPAGVGTRSFLTAKWTPPGGGPDLLVTGDNGDFTLRLEDVSQAQAGTYTCHIHLQEQQLNATVTLAIITVTPKSFGSPGSLGKLLCEVTPVSGQERFVWSSLDTPSQRSFSGPWLEAQEAQLLSQPWQCQLYQGERLLGAAVYFTELSSPGAQRSGRAPGALPAGHL

SEQ ID NO: 113 - protein, 908 aa, synthetic construct
  REGION 1..908: note = CD86 IgV-sugemalimab heavy chain -LAG3 D1/D2/D3
APLKIQAYFNETADLPCQFANSQNQSLSELVVFWQDQENLVLNEVYLGKEKFDSVHSKYMGRTSFDSDSWTLRLHNLQIKDKGLYQCIIHHKKPTGMIRIHQMNSELSVLGGGGSGGGGSGGGGSGGGGSGEVQLLESGGGLVQPGGSLRLSCAASGFTFSSYAMSWVRQAPGKGLEWVSGISGSGGFTYYADSVKGRFTISRDNSKNTLYLQMNSLRAEDTAVYYCAKPPRGYNYGPFDYWGQGTLVTVSSASTKGPSVFPLAPCSRSTSESTAALGCLVKDYFPEPVTVSWNSGALTSGVHTFPAVLQSSGLYSLSSVVTVPSSSLGTKTYTCNVDHKPSNTKVDKRVESKYGPPCPPCPAPEFLGGPSVFLFPPKPKDTLMISRTPEVTCVVVDVSQEDPEVQFNWYVDGVEVHNAKTKPREEQFNSTYRVVSVLTVLHQDWLNGKEYKCKVSNKGLPSSIEKTISKAKGQPREPQVYTLPPSQEEMTKNQVSLTCLVKGFYPSDIAVEWESNGQPENNYKTTPPVLDSDGSFFLYSRLTVDKSRWQEGNVFSCSVMHEALHNHYTQKSLSLSLGAGGGGGSGGGGSGGGGSGGGGSGGAPAQLPCSPTIPLQDLSLLRRAGVTWQHQPDSGPPAAAPGHPLAPGPHPAAPSSWGPRPRRYTVLSVGPGGLRSGRLPLQPRVQLDERGRQRGDFSLWLRPARRADAGEYRAAVHLRDRALSCRLRLRLGQASMTASPPGSLRASDWVILNCSFSRPDRPASVHWFRNRGQGRVPVRESPHHHLAESFLFLPQVSPMDSGPWGCILTYRDGFNVSIMYNLTVLGLEPPTPLTVYAGAGSRVGLPCRLPAGVGTRSFLTAKWTPPGGGPDLLVTGDNGDFTLRLEDVSQAQAGTYTCHIHLQEQQLN

SEQ ID NO: 114 - protein, 817 aa, synthetic construct
  REGION 1..817: note = CD86 IgV-sugemalimab heavy chain -LAG3 D1/D2
APLKIQAYFNETADLPCQFANSQNQSLSELVVFWQDQENLVLNEVYLGKEKFDSVHSKYMGRTSFDSDSWTLRLHNLQIKDKGLYQCIIHHKKPTGMIRIHQMNSELSVLGGGGSGGGGSGGGGSGGGGSGEVQLLESGGGLVQPGGSLRLSCAASGFTFSSYAMSWVRQAPGKGLEWVSGISGSGGFTYYADSVKGRFTISRDNSKNTLYLQMNSLRAEDTAVYYCAKPPRGYNYGPFDYWGQGTLVTVSSASTKGPSVFPLAPCSRSTSESTAALGCLVKDYFPEPVTVSWNSGALTSGVHTFPAVLQSSGLYSLSSVVTVPSSSLGTKTYTCNVDHKPSNTKVDKRVESKYGPPCPPCPAPEFLGGPSVFLFPPKPKDTLMISRTPEVTCVVVDVSQEDPEVQFNWYVDGVEVHNAKTKPREEQFNSTYRVVSVLTVLHQDWLNGKEYKCKVSNKGLPSSIEKTISKAKGQPREPQVYTLPPSQEEMTKNQVSLTCLVKGFYPSDIAVEWESNGQPENNYKTTPPVLDSDGSFFLYSRLTVDKSRWQEGNVFSCSVMHEALHNHYTQKSLSLSLGAGGGGGSGGGGSGGGGSGGGGSGGAPAQLPCSPTIPLQDLSLLRRAGVTWQHQPDSGPPAAAPGHPLAPGPHPAAPSSWGPRPRRYTVLSVGPGGLRSGRLPLQPRVQLDERGRQRGDFSLWLRPARRADAGEYRAAVHLRDRALSCRLRLRLGQASMTASPPGSLRASDWVILNCSFSRPDRPASVHWFRNRGQGRVPVRESPHHHLAESFLFLPQVSPMDSGPWGCILTYRDGFNVS

SEQ ID NO: 115 - protein, 732 aa, synthetic construct
  REGION 1..732: note = CD86 IgV-sugemalimab heavy chain -LAG3 IgD1
APLKIQAYFNETADLPCQFANSQNQSLSELVVFWQDQENLVLNEVYLGKEKFDSVHSKYMGRTSFDSDSWTLRLHNLQIKDKGLYQCIIHHKKPTGMIRIHQMNSELSVLGGGGSGGGGSGGGGSGGGGSGEVQLLESGGGLVQPGGSLRLSCAASGFTFSSYAMSWVRQAPGKGLEWVSGISGSGGFTYYADSVKGRFTISRDNSKNTLYLQMNSLRAEDTAVYYCAKPPRGYNYGPFDYWGQGTLVTVSSASTKGPSVFPLAPCSRSTSESTAALGCLVKDYFPEPVTVSWNSGALTSGVHTFPAVLQSSGLYSLSSVVTVPSSSLGTKTYTCNVDHKPSNTKVDKRVESKYGPPCPPCPAPEFLGGPSVFLFPPKPKDTLMISRTPEVTCVVVDVSQEDPEVQFNWYVDGVEVHNAKTKPREEQFNSTYRVVSVLTVLHQDWLNGKEYKCKVSNKGLPSSIEKTISKAKGQPREPQVYTLPPSQEEMTKNQVSLTCLVKGFYPSDIAVEWESNGQPENNYKTTPPVLDSDGSFFLYSRLTVDKSRWQEGNVFSCSVMHEALHNHYTQKSLSLSLGAGGGGGSGGGGSGGGGSGGGGSGGAPAQLPCSPTIPLQDLSLLRRAGVTWQHQPDSGPPAAAPGHPLAPGPHPAAPSSWGPRPRRYTVLSVGPGGLRSGRLPLQPRVQLDERGRQRGDFSLWLRPARRADAGEYRAAVHLRDRALSCRLRLRLG

SEQ ID NO: 116 - protein, 1028 aa, synthetic construct
  REGION 1..1028: note = LAG3-sugemalimab heavy chain -CD86 IgV
LQPGAEVPVVWAQEGAPAQLPCSPTIPLQDLSLLRRAGVTWQHQPDSGPPAAAPGHPLAPGPHPAAPSSWGPRPRRYTVLSVGPGGLRSGRLPLQPRVQLDERGRQRGDFSLWLRPARRADAGEYRAAVHLRDRALSCRLRLRLGQASMTASPPGSLRASDWVILNCSFSRPDRPASVHWFRNRGQGRVPVRESPHHHLAESFLFLPQVSPMDSGPWGCILTYRDGFNVSIMYNLTVLGLEPPTPLTVYAGAGSRVGLPCRLPAGVGTRSFLTAKWTPPGGGPDLLVTGDNGDFTLRLEDVSQAQAGTYTCHIHLQEQQLNATVTLAIITVTPKSFGSPGSLGKLLCEVTPVSGQERFVWSSLDTPSQRSFSGPWLEAQEAQLLSQPWQCQLYQGERLLGAAVYFTELSSPGAQRSGRAPGALPAGHLGGGGGSGGGGSGGGGSGGGGSGEVQLLESGGGLVQPGGSLRLSCAASGFTFSSYAMSWVRQAPGKGLEWVSGISGSGGFTYYADSVKGRFTISRDNSKNTLYLQMNSLRAEDTAVYYCAKPPRGYNYGPFDYWGQGTLVTVSSASTKGPSVFPLAPCSRSTSESTAALGCLVKDYFPEPVTVSWNSGALTSGVHTFPAVLQSSGLYSLSSVVTVPSSSLGTKTYTCNVDHKPSNTKVDKRVESKYGPPCPPCPAPEFLGGPSVFLFPPKPKDTLMISRTPEVTCVVVDVSQEDPEVQFNWYVDGVEVHNAKTKPREEQFNSTYRVVSVLTVLHQDWLNGKEYKCKVSNKGLPSSIEKTISKAKGQPREPQVYTLPPSQEEMTKNQVSLTCLVKGFYPSDIAVEWESNGQPENNYKTTPPVLDSDGSFFLYSRLTVDKSRWQEGNVFSCSVMHEALHNHYTQKSLSLSLGAGGGGGSGGGGSGGGGSGGGGAPLKIQAYFNETADLPCQFANSQNQSLSELVVFWQDQENLVLNEVYLGKEKFDSVHSKYMGRTSFDSDSWTLRLHNLQIKDKGLYQCIIHHKKPTGMIRIHQMNSELSVL

SEQ ID NO: 117 - protein, 907 aa, synthetic construct
  REGION 1..907: note = LAG3 D1/D2/D3-sugemalimab heavy chain -CD86 IgV
GAPAQLPCSPTIPLQDLSLLRRAGVTWQHQPDSGPPAAAPGHPLAPGPHPAAPSSWGPRPRRYTVLSVGPGGLRSGRLPLQPRVQLDERGRQRGDFSLWLRPARRADAGEYRAAVHLRDRALSCRLRLRLGQASMTASPPGSLRASDWVILNCSFSRPDRPASVHWFRNRGQGRVPVRESPHHHLAESFLFLPQVSPMDSGPWGCILTYRDGFNVSIMYNLTVLGLEPPTPLTVYAGAGSRVGLPCRLPAGVGTRSFLTAKWTPPGGGPDLLVTGDNGDFTLRLEDVSQAQAGTYTCHIHLQEQQLNGGGGGSGGGGSGGGGSGGGGSGEVQLLESGGGLVQPGGSLRLSCAASGFTFSSYAMSWVRQAPGKGLEWVSGISGSGGFTYYADSVKGRFTISRDNSKNTLYLQMNSLRAEDTAVYYCAKPPRGYNYGPFDYWGQGTLVTVSSASTKGPSVFPLAPCSRSTSESTAALGCLVKDYFPEPVTVSWNSGALTSGVHTFPAVLQSSGLYSLSSVVTVPSSSLGTKTYTCNVDHKPSNTKVDKRVESKYGPPCPPCPAPEFLGGPSVFLFPPKPKDTLMISRTPEVTCVVVDVSQEDPEVQFNWYVDGVEVHNAKTKPREEQFNSTYRVVSVLTVLHQDWLNGKEYKCKVSNKGLPSSIEKTISKAKGQPREPQVYTLPPSQEEMTKNQVSLTCLVKGFYPSDIAVEWESNGQPENNYKTTPPVLDSDGSFFLYSRLTVDKSRWQEGNVFSCSVMHEALHNHYTQKSLSLSLGAGGGGGSGGGGSGGGGSGGGGAPLKIQAYFNETADLPCQFANSQNQSLSELVVFWQDQENLVLNEVYLGKEKFDSVHSKYMGRTSFDSDSWTLRLHNLQIKDKGLYQCIIHHKKPTGMIRIHQMNSELSVL

SEQ ID NO: 118 - protein, 816 aa, synthetic construct
  REGION 1..816: note = LAG3 D1/D2-sugemalimab heavy chain -CD86 IgV
GAPAQLPCSPTIPLQDLSLLRRAGVTWQHQPDSGPPAAAPGHPLAPGPHPAAPSSWGPRPRRYTVLSVGPGGLRSGRLPLQPRVQLDERGRQRGDFSLWLRPARRADAGEYRAAVHLRDRALSCRLRLRLGQASMTASPPGSLRASDWVILNCSFSRPDRPASVHWFRNRGQGRVPVRESPHHHLAESFLFLPQVSPMDSGPWGCILTYRDGFNVSGGGGGSGGGGSGGGGSGGGGSGEVQLLESGGGLVQPGGSLRLSCAASGFTFSSYAMSWVRQAPGKGLEWVSGISGSGGFTYYADSVKGRFTISRDNSKNTLYLQMNSLRAEDTAVYYCAKPPRGYNYGPFDYWGQGTLVTVSSASTKGPSVFPLAPCSRSTSESTAALGCLVKDYFPEPVTVSWNSGALTSGVHTFPAVLQSSGLYSLSSVVTVPSSSLGTKTYTCNVDHKPSNTKVDKRVESKYGPPCPPCPAPEFLGGPSVFLFPPKPKDTLMISRTPEVTCVVVDVSQEDPEVQFNWYVDGVEVHNAKTKPREEQFNSTYRVVSVLTVLHQDWLNGKEYKCKVSNKGLPSSIEKTISKAKGQPREPQVYTLPPSQEEMTKNQVSLTCLVKGFYPSDIAVEWESNGQPENNYKTTPPVLDSDGSFFLYSRLTVDKSRWQEGNVFSCSVMHEALHNHYTQKSLSLSLGAGGGGGSGGGGSGGGGSGGGGAPLKIQAYFNETADLPCQFANSQNQSLSELVVFWQDQENLVLNEVYLGKEKFDSVHSKYMGRTSFDSDSWTLRLHNLQIKDKGLYQCIIHHKKPTGMIRIHQMNSELSVL

SEQ ID NO: 119 - protein, 731 aa, synthetic construct
  REGION 1..731: note = LAG3 IgD1-sugemalimab heavy chain -CD86 IgV
GAPAQLPCSPTIPLQDLSLLRRAGVTWQHQPDSGPPAAAPGHPLAPGPHPAAPSSWGPRPRRYTVLSVGPGGLRSGRLPLQPRVQLDERGRQRGDFSLWLRPARRADAGEYRAAVHLRDRALSCRLRLRLGGGGGGSGGGGSGGGGSGGGGSGEVQLLESGGGLVQPGGSLRLSCAASGFTFSSYAMSWVRQAPGKGLEWVSGISGSGGFTYYADSVKGRFTISRDNSKNTLYLQMNSLRAEDTAVYYCAKPPRGYNYGPFDYWGQGTLVTVSSASTKGPSVFPLAPCSRSTSESTAALGCLVKDYFPEPVTVSWNSGALTSGVHTFPAVLQSSGLYSLSSVVTVPSSSLGTKTYTCNVDHKPSNTKVDKRVESKYGPPCPPCPAPEFLGGPSVFLFPPKPKDTLMISRTPEVTCVVVDVSQEDPEVQFNWYVDGVEVHNAKTKPREEQFNSTYRVVSVLTVLHQDWLNGKEYKCKVSNKGLPSSIEKTISKAKGQPREPQVYTLPPSQEEMTKNQVSLTCLVKGFYPSDIAVEWESNGQPENNYKTTPPVLDSDGSFFLYSRLTVDKSRWQEGNVFSCSVMHEALHNHYTQKSLSLSLGAGGGGGSGGGGSGGGGSGGGGAPLKIQAYFNETADLPCQFANSQNQSLSELVVFWQDQENLVLNEVYLGKEKFDSVHSKYMGRTSFDSDSWTLRLHNLQIKDKGLYQCIIHHKKPTGMIRIHQMNSELSVL

SEQ ID NO: 120 - protein, 1144 aa, synthetic construct
  REGION 1..1144: note = CD86-LAG3-sugemalimab heavy chain
APLKIQAYFNETADLPCQFANSQNQSLSELVVFWQDQENLVLNEVYLGKEKFDSVHSKYMGRTSFDSDSWTLRLHNLQIKDKGLYQCIIHHKKPTGMIRIHQMNSELSVLANFSQPEIVPISNITENVYINLTCSSIHGYPEPKKMSVLLRTKNSTIEYDGVMQKSQDNVTELYDVSISLSVSFPDVTSNMTIFCILETDKTRLLSSPFSIELEDPQPPPDHIPAGGGGSGGGGSGGGGSGGGGSGLQPGAEVPVVWAQEGAPAQLPCSPTIPLQDLSLLRRAGVTWQHQPDSGPPAAAPGHPLAPGPHPAAPSSWGPRPRRYTVLSVGPGGLRSGRLPLQPRVQLDERGRQRGDFSLWLRPARRADAGEYRAAVHLRDRALSCRLRLRLGQASMTASPPGSLRASDWVILNCSFSRPDRPASVHWFRNRGQGRVPVRESPHHHLAESFLFLPQVSPMDSGPWGCILTYRDGFNVSIMYNLTVLGLEPPTPLTVYAGAGSRVGLPCRLPAGVGTRSFLTAKWTPPGGGPDLLVTGDNGDFTLRLEDVSQAQAGTYTCHIHLQEQQLNATVTLAIITVTPKSFGSPGSLGKLLCEVTPVSGQERFVWSSLDTPSQRSFSGPWLEAQEAQLLSQPWQCQLYQGERLLGAAVYFTELSSPGAQRSGRAPGALPAGHLGGGGGSGGGGSGGGGSGGGGSGEVQLLESGGGLVQPGGSLRLSCAASGFTFSSYAMSWVRQAPGKGLEWVSGISGSGGFTYYADSVKGRFTISRDNSKNTLYLQMNSLRAEDTAVYYCAKPPRGYNYGPFDYWGQGTLVTVSSASTKGPSVFPLAPCSRSTSESTAALGCLVKDYFPEPVTVSWNSGALTSGVHTFPAVLQSSGLYSLSSVVTVPSSSLGTKTYTCNVDHKPSNTKVDKRVESKYGPPCPPCPAPEFLGGPSVFLFPPKPKDTLMISRTPEVTCVVVDVSQEDPEVQFNWYVDGVEVHNAKTKPREEQFNSTYRVVSVLTVLHQDWLNGKEYKCKVSNKGLPSSIEKTISKAKGQPREPQVYTLPPSQEEMTKNQVSLTCLVKGFYPSDIAVEWESNGQPENNYKTTPPVLDSDGSFFLYSRLTVDKSRWQEGNVFSCSVMHEALHNHYTQKSLSLSLGA

SEQ ID NO: 121 - protein, 1023 aa, synthetic construct
  REGION 1..1023: note = CD86-LAG3 D1/D2/D3-sugemalimab heavy chain
APLKIQAYFNETADLPCQFANSQNQSLSELVVFWQDQENLVLNEVYLGKEKFDSVHSKYMGRTSFDSDSWTLRLHNLQIKDKGLYQCIIHHKKPTGMIRIHQMNSELSVLANFSQPEIVPISNITENVYINLTCSSIHGYPEPKKMSVLLRTKNSTIEYDGVMQKSQDNVTELYDVSISLSVSFPDVTSNMTIFCILETDKTRLLSSPFSIELEDPQPPPDHIPAGGGGSGGGGSGGGGSGGGGSGGAPAQLPCSPTIPLQDLSLLRRAGVTWQHQPDSGPPAAAPGHPLAPGPHPAAPSSWGPRPRRYTVLSVGPGGLRSGRLPLQPRVQLDERGRQRGDFSLWLRPARRADAGEYRAAVHLRDRALSCRLRLRLGQASMTASPPGSLRASDWVILNCSFSRPDRPASVHWFRNRGQGRVPVRESPHHHLAESFLFLPQVSPMDSGPWGCILTYRDGFNVSIMYNLTVLGLEPPTPLTVYAGAGSRVGLPCRLPAGVGTRSFLTAKWTPPGGGPDLLVTGDNGDFTLRLEDVSQAQAGTYTCHIHLQEQQLNGGGGGSGGGGSGGGGSGGGGSGEVQLLESGGGLVQPGGSLRLSCAASGFTFSSYAMSWVRQAPGKGLEWVSGISGSGGFTYYADSVKGRFTISRDNSKNTLYLQMNSLRAEDTAVYYCAKPPRGYNYGPFDYWGQGTLVTVSSASTKGPSVFPLAPCSRSTSESTAALGCLVKDYFPEPVTVSWNSGALTSGVHTFPAVLQSSGLYSLSSVVTVPSSSLGTKTYTCNVDHKPSNTKVDKRVESKYGPPCPPCPAPEFLGGPSVFLFPPKPKDTLMISRTPEVTCVVVDVSQEDPEVQFNWYVDGVEVHNAKTKPREEQFNSTYRVVSVLTVLHQDWLNGKEYKCKVSNKGLPSSIEKTISKAKGQPREPQVYTLPPSQEEMTKNQVSLTCLVKGFYPSDIAVEWESNGQPENNYKTTPPVLDSDGSFFLYSRLTVDKSRWQEGNVFSCSVMHEALHNHYTQKSLSLSLGA

SEQ ID NO: 122 - protein, 932 aa, synthetic construct
  REGION 1..932: note = CD86-LAG3 D1/D2-sugemalimab heavy chain
APLKIQAYFNETADLPCQFANSQNQSLSELVVFWQDQENLVLNEVYLGKEKFDSVHSKYMGRTSFDSDSWTLRLHNLQIKDKGLYQCIIHHKKPTGMIRIHQMNSELSVLANFSQPEIVPISNITENVYINLTCSSIHGYPEPKKMSVLLRTKNSTIEYDGVMQKSQDNVTELYDVSISLSVSFPDVTSNMTIFCILETDKTRLLSSPFSIELEDPQPPPDHIPAGGGGSGGGGSGGGGSGGGGSGGAPAQLPCSPTIPLQDLSLLRRAGVTWQHQPDSGPPAAAPGHPLAPGPHPAAPSSWGPRPRRYTVLSVGPGGLRSGRLPLQPRVQLDERGRQRGDFSLWLRPARRADAGEYRAAVHLRDRALSCRLRLRLGQASMTASPPGSLRASDWVILNCSFSRPDRPASVHWFRNRGQGRVPVRESPHHHLAESFLFLPQVSPMDSGPWGCILTYRDGFNVSGGGGGSGGGGSGGGGSGGGGSGEVQLLESGGGLVQPGGSLRLSCAASGFTFSSYAMSWVRQAPGKGLEWVSGISGSGGFTYYADSVKGRFTISRDNSKNTLYLQMNSLRAEDTAVYYCAKPPRGYNYGPFDYWGQGTLVTVSSASTKGPSVFPLAPCSRSTSESTAALGCLVKDYFPEPVTVSWNSGALTSGVHTFPAVLQSSGLYSLSSVVTVPSSSLGTKTYTCNVDHKPSNTKVDKRVESKYGPPCPPCPAPEFLGGPSVFLFPPKPKDTLMISRTPEVTCVVVDVSQEDPEVQFNWYVDGVEVHNAKTKPREEQFNSTYRVVSVLTVLHQDWLNGKEYKCKVSNKGLPSSIEKTISKAKGQPREPQVYTLPPSQEEMTKNQVSLTCLVKGFYPSDIAVEWESNGQPENNYKTTPPVLDSDGSFFLYSRLTVDKSRWQEGNVFSCSVMHEALHNHYTQKSLSLSLGA

SEQ ID NO: 123 - protein, 847 aa, synthetic construct
  REGION 1..847: note = CD86-LAG3 IgD1-sugemalimab heavy chain
APLKIQAYFNETADLPCQFANSQNQSLSELVVFWQDQENLVLNEVYLGKEKFDSVHSKYMGRTSFDSDSWTLRLHNLQIKDKGLYQCIIHHKKPTGMIRIHQMNSELSVLANFSQPEIVPISNITENVYINLTCSSIHGYPEPKKMSVLLRTKNSTIEYDGVMQKSQDNVTELYDVSISLSVSFPDVTSNMTIFCILETDKTRLLSSPFSIELEDPQPPPDHIPAGGGGSGGGGSGGGGSGGGGSGGAPAQLPCSPTIPLQDLSLLRRAGVTWQHQPDSGPPAAAPGHPLAPGPHPAAPSSWGPRPRRYTVLSVGPGGLRSGRLPLQPRVQLDERGRQRGDFSLWLRPARRADAGEYRAAVHLRDRALSCRLRLRLGGGGGGSGGGGSGGGGSGGGGSGEVQLLESGGGLVQPGGSLRLSCAASGFTFSSYAMSWVRQAPGKGLEWVSGISGSGGFTYYADSVKGRFTISRDNSKNTLYLQMNSLRAEDTAVYYCAKPPRGYNYGPFDYWGQGTLVTVSSASTKGPSVFPLAPCSRSTSESTAALGCLVKDYFPEPVTVSWNSGALTSGVHTFPAVLQSSGLYSLSSVVTVPSSSLGTKTYTCNVDHKPSNTKVDKRVESKYGPPCPPCPAPEFLGGPSVFLFPPKPKDTLMISRTPEVTCVVVDVSQEDPEVQFNWYVDGVEVHNAKTKPREEQFNSTYRVVSVLTVLHQDWLNGKEYKCKVSNKGLPSSIEKTISKAKGQPREPQVYTLPPSQEEMTKNQVSLTCLVKGFYPSDIAVEWESNGQPENNYKTTPPVLDSDGSFFLYSRLTVDKSRWQEGNVFSCSVMHEALHNHYTQKSLSLSLGA

SEQ ID NO: 124 - protein, 1144 aa, synthetic construct
  REGION 1..1144: note = LAG3-CD86-sugemalimab heavy chain
LQPGAEVPVVWAQEGAPAQLPCSPTIPLQDLSLLRRAGVTWQHQPDSGPPAAAPGHPLAPGPHPAAPSSWGPRPRRYTVLSVGPGGLRSGRLPLQPRVQLDERGRQRGDFSLWLRPARRADAGEYRAAVHLRDRALSCRLRLRLGQASMTASPPGSLRASDWVILNCSFSRPDRPASVHWFRNRGQGRVPVRESPHHHLAESFLFLPQVSPMDSGPWGCILTYRDGFNVSIMYNLTVLGLEPPTPLTVYAGAGSRVGLPCRLPAGVGTRSFLTAKWTPPGGGPDLLVTGDNGDFTLRLEDVSQAQAGTYTCHIHLQEQQLNATVTLAIITVTPKSFGSPGSLGKLLCEVTPVSGQERFVWSSLDTPSQRSFSGPWLEAQEAQLLSQPWQCQLYQGERLLGAAVYFTELSSPGAQRSGRAPGALPAGHLGGGGGSGGGGSGGGGSGGGGSGAPLKIQAYFNETADLPCQFANSQNQSLSELVVFWQDQENLVLNEVYLGKEKFDSVHSKYMGRTSFDSDSWTLRLHNLQIKDKGLYQCIIHHKKPTGMIRIHQMNSELSVLANFSQPEIVPISNITENVYINLTCSSIHGYPEPKKMSVLLRTKNSTIEYDGVMQKSQDNVTELYDVSISLSVSFPDVTSNMTIFCILETDKTRLLSSPFSIELEDPQPPPDHIPAGGGGSGGGGSGGGGSGGGGSGEVQLLESGGGLVQPGGSLRLSCAASGFTFSSYAMSWVRQAPGKGLEWVSGISGSGGFTYYADSVKGRFTISRDNSKNTLYLQMNSLRAEDTAVYYCAKPPRGYNYGPFDYWGQGTLVTVSSASTKGPSVFPLAPCSRSTSESTAALGCLVKDYFPEPVTVSWNSGALTSGVHTFPAVLQSSGLYSLSSVVTVPSSSLGTKTYTCNVDHKPSNTKVDKRVESKYGPPCPPCPAPEFLGGPSVFLFPPKPKDTLMISRTPEVTCVVVDVSQEDPEVQFNWYVDGVEVHNAKTKPREEQFNSTYRVVSVLTVLHQDWLNGKEYKCKVSNKGLPSSIEKTISKAKGQPREPQVYTLPPSQEEMTKNQVSLTCLVKGFYPSDIAVEWESNGQPENNYKTTPPVLDSDGSFFLYSRLTVDKSRWQEGNVFSCSVMHEALHNHYTQKSLSLSLGA

SEQ ID NO: 125 - protein, 1023 aa, synthetic construct
  REGION 1..1023: note = LAG3 D1/D2/D3-CD86-sugemalimab heavy chain
GAPAQLPCSPTIPLQDLSLLRRAGVTWQHQPDSGPPAAAPGHPLAPGPHPAAPSSWGPRPRRYTVLSVGPGGLRSGRLPLQPRVQLDERGRQRGDFSLWLRPARRADAGEYRAAVHLRDRALSCRLRLRLGQASMTASPPGSLRASDWVILNCSFSRPDRPASVHWFRNRGQGRVPVRESPHHHLAESFLFLPQVSPMDSGPWGCILTYRDGFNVSIMYNLTVLGLEPPTPLTVYAGAGSRVGLPCRLPAGVGTRSFLTAKWTPPGGGPDLLVTGDNGDFTLRLEDVSQAQAGTYTCHIHLQEQQLNGGGGGSGGGGSGGGGSGGGGSGAPLKIQAYFNETADLPCQFANSQNQSLSELVVFWQDQENLVLNEVYLGKEKFDSVHSKYMGRTSFDSDSWTLRLHNLQIKDKGLYQCIIHHKKPTGMIRIHQMNSELSVLANFSQPEIVPISNITENVYINLTCSSIHGYPEPKKMSVLLRTKNSTIEYDGVMQKSQDNVTELYDVSISLSVSFPDVTSNMTIFCILETDKTRLLSSPFSIELEDPQPPPDHIPAGGGGSGGGGSGGGGSGGGGSGEVQLLESGGGLVQPGGSLRLSCAASGFTFSSYAMSWVRQAPGKGLEWVSGISGSGGFTYYADSVKGRFTISRDNSKNTLYLQMNSLRAEDTAVYYCAKPPRGYNYGPFDYWGQGTLVTVSSASTKGPSVFPLAPCSRSTSESTAALGCLVKDYFPEPVTVSWNSGALTSGVHTFPAVLQSSGLYSLSSVVTVPSSSLGTKTYTCNVDHKPSNTKVDKRVESKYGPPCPPCPAPEFLGGPSVFLFPPKPKDTLMISRTPEVTCVVVDVSQEDPEVQFNWYVDGVEVHNAKTKPREEQFNSTYRVVSVLTVLHQDWLNGKEYKCKVSNKGLPSSIEKTISKAKGQPREPQVYTLPPSQEEMTKNQVSLTCLVKGFYPSDIAVEWESNGQPENNYKTTPPVLDSDGSFFLYSRLTVDKSRWQEGNVFSCSVMHEALHNHYTQKSLSLSLGA

SEQ ID NO: 126 - protein, 932 aa, synthetic construct
  REGION 1..932: note = LAG3 D1/D2-CD86-sugemalimab heavy chain
GAPAQLPCSPTIPLQDLSLLRRAGVTWQHQPDSGPPAAAPGHPLAPGPHPAAPSSWGPRPRRYTVLSVGPGGLRSGRLPLQPRVQLDERGRQRGDFSLWLRPARRADAGEYRAAVHLRDRALSCRLRLRLGQASMTASPPGSLRASDWVILNCSFSRPDRPASVHWFRNRGQGRVPVRESPHHHLAESFLFLPQVSPMDSGPWGCILTYRDGFNVSGGGGGSGGGGSGGGGSGGGGSGAPLKIQAYFNETADLPCQFANSQNQSLSELVVFWQDQENLVLNEVYLGKEKFDSVHSKYMGRTSFDSDSWTLRLHNLQIKDKGLYQCIIHHKKPTGMIRIHQMNSELSVLANFSQPEIVPISNITENVYINLTCSSIHGYPEPKKMSVLLRTKNSTIEYDGVMQKSQDNVTELYDVSISLSVSFPDVTSNMTIFCILETDKTRLLSSPFSIELEDPQPPPDHIPAGGGGSGGGGSGGGGSGGGGSGEVQLLESGGGLVQPGGSLRLSCAASGFTFSSYAMSWVRQAPGKGLEWVSGISGSGGFTYYADSVKGRFTISRDNSKNTLYLQMNSLRAEDTAVYYCAKPPRGYNYGPFDYWGQGTLVTVSSASTKGPSVFPLAPCSRSTSESTAALGCLVKDYFPEPVTVSWNSGALTSGVHTFPAVLQSSGLYSLSSVVTVPSSSLGTKTYTCNVDHKPSNTKVDKRVESKYGPPCPPCPAPEFLGGPSVFLFPPKPKDTLMISRTPEVTCVVVDVSQEDPEVQFNWYVDGVEVHNAKTKPREEQFNSTYRVVSVLTVLHQDWLNGKEYKCKVSNKGLPSSIEKTISKAKGQPREPQVYTLPPSQEEMTKNQVSLTCLVKGFYPSDIAVEWESNGQPENNYKTTPPVLDSDGSFFLYSRLTVDKSRWQEGNVFSCSVMHEALHNHYTQKSLSLSLGA

SEQ ID NO: 127 - protein, 847 aa, synthetic construct
  REGION 1..847: note = LAG3 IgD1-CD86-sugemalimab heavy chain
GAPAQLPCSPTIPLQDLSLLRRAGVTWQHQPDSGPPAAAPGHPLAPGPHPAAPSSWGPRPRRYTVLSVGPGGLRSGRLPLQPRVQLDERGRQRGDFSLWLRPARRADAGEYRAAVHLRDRALSCRLRLRLGGGGGGSGGGGSGGGGSGGGGSGAPLKIQAYFNETADLPCQFANSQNQSLSELVVFWQDQENLVLNEVYLGKEKFDSVHSKYMGRTSFDSDSWTLRLHNLQIKDKGLYQCIIHHKKPTGMIRIHQMNSELSVLANFSQPEIVPISNITENVYINLTCSSIHGYPEPKKMSVLLRTKNSTIEYDGVMQKSQDNVTELYDVSISLSVSFPDVTSNMTIFCILETDKTRLLSSPFSIELEDPQPPPDHIPAGGGGSGGGGSGGGGSGGGGSGEVQLLESGGGLVQPGGSLRLSCAASGFTFSSYAMSWVRQAPGKGLEWVSGISGSGGFTYYADSVKGRFTISRDNSKNTLYLQMNSLRAEDTAVYYCAKPPRGYNYGPFDYWGQGTLVTVSSASTKGPSVFPLAPCSRSTSESTAALGCLVKDYFPEPVTVSWNSGALTSGVHTFPAVLQSSGLYSLSSVVTVPSSSLGTKTYTCNVDHKPSNTKVDKRVESKYGPPCPPCPAPEFLGGPSVFLFPPKPKDTLMISRTPEVTCVVVDVSQEDPEVQFNWYVDGVEVHNAKTKPREEQFNSTYRVVSVLTVLHQDWLNGKEYKCKVSNKGLPSSIEKTISKAKGQPREPQVYTLPPSQEEMTKNQVSLTCLVKGFYPSDIAVEWESNGQPENNYKTTPPVLDSDGSFFLYSRLTVDKSRWQEGNVFSCSVMHEALHNHYTQKSLSLSLGA

SEQ ID NO: 128 - protein, 1029 aa, synthetic construct
  REGION 1..1029: note = CD86 IgV-LAG3-sugemalimab heavy chain
APLKIQAYFNETADLPCQFANSQNQSLSELVVFWQDQENLVLNEVYLGKEKFDSVHSKYMGRTSFDSDSWTLRLHNLQIKDKGLYQCIIHHKKPTGMIRIHQMNSELSVLGGGGSGGGGSGGGGSGGGGSGLQPGAEVPVVWAQEGAPAQLPCSPTIPLQDLSLLRRAGVTWQHQPDSGPPAAAPGHPLAPGPHPAAPSSWGPRPRRYTVLSVGPGGLRSGRLPLQPRVQLDERGRQRGDFSLWLRPARRADAGEYRAAVHLRDRALSCRLRLRLGQASMTASPPGSLRASDWVILNCSFSRPDRPASVHWFRNRGQGRVPVRESPHHHLAESFLFLPQVSPMDSGPWGCILTYRDGFNVSIMYNLTVLGLEPPTPLTVYAGAGSRVGLPCRLPAGVGTRSFLTAKWTPPGGGPDLLVTGDNGDFTLRLEDVSQAQAGTYTCHIHLQEQQLNATVTLAIITVTPKSFGSPGSLGKLLCEVTPVSGQERFVWSSLDTPSQRSFSGPWLEAQEAQLLSQPWQCQLYQGERLLGAAVYFTELSSPGAQRSGRAPGALPAGHLGGGGGSGGGGSGGGGSGGGGSGEVQLLESGGGLVQPGGSLRLSCAASGFTFSSYAMSWVRQAPGKGLEWVSGISGSGGFTYYADSVKGRFTISRDNSKNTLYLQMNSLRAEDTAVYYCAKPPRGYNYGPFDYWGQGTLVTVSSASTKGPSVFPLAPCSRSTSESTAALGCLVKDYFPEPVTVSWNSGALTSGVHTFPAVLQSSGLYSLSSVVTVPSSSLGTKTYTCNVDHKPSNTKVDKRVESKYGPPCPPCPAPEFLGGPSVFLFPPKPKDTLMISRTPEVTCVVVDVSQEDPEVQFNWYVDGVEVHNAKTKPREEQFNSTYRVVSVLTVLHQDWLNGKEYKCKVSNKGLPSSIEKTISKAKGQPREPQVYTLPPSQEEMTKNQVSLTCLVKGFYPSDIAVEWESNGQPENNYKTTPPVLDSDGSFFLYSRLTVDKSRWQEGNVFSCSVMHEALHNHYTQKSLSLSLGA

SEQ ID NO: 129 - protein, 908 aa, synthetic construct
  REGION 1..908: note = CD86 IgV-LAG3 D1/D2/D3-sugemalimab heavy chain
APLKIQAYFNETADLPCQFANSQNQSLSELVVFWQDQENLVLNEVYLGKEKFDSVHSKYMGRTSFDSDSWTLRLHNLQIKDKGLYQCIIHHKKPTGMIRIHQMNSELSVLGGGGSGGGGSGGGGSGGGGSGGAPAQLPCSPTIPLQDLSLLRRAGVTWQHQPDSGPPAAAPGHPLAPGPHPAAPSSWGPRPRRYTVLSVGPGGLRSGRLPLQPRVQLDERGRQRGDFSLWLRPARRADAGEYRAAVHLRDRALSCRLRLRLGQASMTASPPGSLRASDWVILNCSFSRPDRPASVHWFRNRGQGRVPVRESPHHHLAESFLFLPQVSPMDSGPWGCILTYRDGFNVSIMYNLTVLGLEPPTPLTVYAGAGSRVGLPCRLPAGVGTRSFLTAKWTPPGGGPDLLVTGDNGDFTLRLEDVSQAQAGTYTCHIHLQEQQLNGGGGGSGGGGSGGGGSGGGGSGEVQLLESGGGLVQPGGSLRLSCAASGFTFSSYAMSWVRQAPGKGLEWVSGISGSGGFTYYADSVKGRFTISRDNSKNTLYLQMNSLRAEDTAVYYCAKPPRGYNYGPFDYWGQGTLVTVSSASTKGPSVFPLAPCSRSTSESTAALGCLVKDYFPEPVTVSWNSGALTSGVHTFPAVLQSSGLYSLSSVVTVPSSSLGTKTYTCNVDHKPSNTKVDKRVESKYGPPCPPCPAPEFLGGPSVFLFPPKPKDTLMISRTPEVTCVVVDVSQEDPEVQFNWYVDGVEVHNAKTKPREEQFNSTYRVVSVLTVLHQDWLNGKEYKCKVSNKGLPSSIEKTISKAKGQPREPQVYTLPPSQEEMTKNQVSLTCLVKGFYPSDIAVEWESNGQPENNYKTTPPVLDSDGSFFLYSRLTVDKSRWQEGNVFSCSVMHEALHNHYTQKSLSLSLGA

SEQ ID NO: 130 - protein, 817 aa, synthetic construct
  REGION 1..817: note = CD86 IgV-LAG3 D1/D2-sugemalimab heavy chain
APLKIQAYFNETADLPCQFANSQNQSLSELVVFWQDQENLVLNEVYLGKEKFDSVHSKYMGRTSFDSDSWTLRLHNLQIKDKGLYQCIIHHKKPTGMIRIHQMNSELSVLGGGGSGGGGSGGGGSGGGGSGGAPAQLPCSPTIPLQDLSLLRRAGVTWQHQPDSGPPAAAPGHPLAPGPHPAAPSSWGPRPRRYTVLSVGPGGLRSGRLPLQPRVQLDERGRQRGDFSLWLRPARRADAGEYRAAVHLRDRALSCRLRLRLGQASMTASPPGSLRASDWVILNCSFSRPDRPASVHWFRNRGQGRVPVRESPHHHLAESFLFLPQVSPMDSGPWGCILTYRDGFNVSGGGGGSGGGGSGGGGSGGGGSGEVQLLESGGGLVQPGGSLRLSCAASGFTFSSYAMSWVRQAPGKGLEWVSGISGSGGFTYYADSVKGRFTISRDNSKNTLYLQMNSLRAEDTAVYYCAKPPRGYNYGPFDYWGQGTLVTVSSASTKGPSVFPLAPCSRSTSESTAALGCLVKDYFPEPVTVSWNSGALTSGVHTFPAVLQSSGLYSLSSVVTVPSSSLGTKTYTCNVDHKPSNTKVDKRVESKYGPPCPPCPAPEFLGGPSVFLFPPKPKDTLMISRTPEVTCVVVDVSQEDPEVQFNWYVDGVEVHNAKTKPREEQFNSTYRVVSVLTVLHQDWLNGKEYKCKVSNKGLPSSIEKTISKAKGQPREPQVYTLPPSQEEMTKNQVSLTCLVKGFYPSDIAVEWESNGQPENNYKTTPPVLDSDGSFFLYSRLTVDKSRWQEGNVFSCSVMHEALHNHYTQKSLSLSLGA

SEQ ID NO: 131 - protein, 732 aa, synthetic construct
  REGION 1..732: note = CD86 IgV-LAG3 IgD1-sugemalimab heavy chain
APLKIQAYFNETADLPCQFANSQNQSLSELVVFWQDQENLVLNEVYLGKEKFDSVHSKYMGRTSFDSDSWTLRLHNLQIKDKGLYQCIIHHKKPTGMIRIHQMNSELSVLGGGGSGGGGSGGGGSGGGGSGGAPAQLPCSPTIPLQDLSLLRRAGVTWQHQPDSGPPAAAPGHPLAPGPHPAAPSSWGPRPRRYTVLSVGPGGLRSGRLPLQPRVQLDERGRQRGDFSLWLRPARRADAGEYRAAVHLRDRALSCRLRLRLGGGGGGSGGGGSGGGGSGGGGSGEVQLLESGGGLVQPGGSLRLSCAASGFTFSSYAMSWVRQAPGKGLEWVSGISGSGGFTYYADSVKGRFTISRDNSKNTLYLQMNSLRAEDTAVYYCAKPPRGYNYGPFDYWGQGTLVTVSSASTKGPSVFPLAPCSRSTSESTAALGCLVKDYFPEPVTVSWNSGALTSGVHTFPAVLQSSGLYSLSSVVTVPSSSLGTKTYTCNVDHKPSNTKVDKRVESKYGPPCPPCPAPEFLGGPSVFLFPPKPKDTLMISRTPEVTCVVVDVSQEDPEVQFNWYVDGVEVHNAKTKPREEQFNSTYRVVSVLTVLHQDWLNGKEYKCKVSNKGLPSSIEKTISKAKGQPREPQVYTLPPSQEEMTKNQVSLTCLVKGFYPSDIAVEWESNGQPENNYKTTPPVLDSDGSFFLYSRLTVDKSRWQEGNVFSCSVMHEALHNHYTQKSLSLSLGA

SEQ ID NO: 132 - protein, 1029 aa, synthetic construct
  REGION 1..1029: note = LAG3-CD86 IgV-sugemalimab heavy chain
LQPGAEVPVVWAQEGAPAQLPCSPTIPLQDLSLLRRAGVTWQHQPDSGPPAAAPGHPLAPGPHPAAPSSWGPRPRRYTVLSVGPGGLRSGRLPLQPRVQLDERGRQRGDFSLWLRPARRADAGEYRAAVHLRDRALSCRLRLRLGQASMTASPPGSLRASDWVILNCSFSRPDRPASVHWFRNRGQGRVPVRESPHHHLAESFLFLPQVSPMDSGPWGCILTYRDGFNVSIMYNLTVLGLEPPTPLTVYAGAGSRVGLPCRLPAGVGTRSFLTAKWTPPGGGPDLLVTGDNGDFTLRLEDVSQAQAGTYTCHIHLQEQQLNATVTLAIITVTPKSFGSPGSLGKLLCEVTPVSGQERFVWSSLDTPSQRSFSGPWLEAQEAQLLSQPWQCQLYQGERLLGAAVYFTELSSPGAQRSGRAPGALPAGHLGGGGGSGGGGSGGGGSGGGGSGAPLKIQAYFNETADLPCQFANSQNQSLSELVVFWQDQENLVLNEVYLGKEKFDSVHSKYMGRTSFDSDSWTLRLHNLQIKDKGLYQCIIHHKKPTGMIRIHQMNSELSVLGGGGSGGGGSGGGGSGGGGSGEVQLLESGGGLVQPGGSLRLSCAASGFTFSSYAMSWVRQAPGKGLEWVSGISGSGGFTYYADSVKGRFTISRDNSKNTLYLQMNSLRAEDTAVYYCAKPPRGYNYGPFDYWGQGTLVTVSSASTKGPSVFPLAPCSRSTSESTAALGCLVKDYFPEPVTVSWNSGALTSGVHTFPAVLQSSGLYSLSSVVTVPSSSLGTKTYTCNVDHKPSNTKVDKRVESKYGPPCPPCPAPEFLGGPSVFLFPPKPKDTLMISRTPEVTCVVVDVSQEDPEVQFNWYVDGVEVHNAKTKPREEQFNSTYRVVSVLTVLHQDWLNGKEYKCKVSNKGLPSSIEKTISKAKGQPREPQVYTLPPSQEEMTKNQVSLTCLVKGFYPSDIAVEWESNGQPENNYKTTPPVLDSDGSFFLYSRLTVDKSRWQEGNVFSCSVMHEALHNHYTQKSLSLSLGA

SEQ ID NO: 133 - protein, 908 aa, synthetic construct
  REGION 1..908: note = LAG3 D1/D2/D3-CD86 IgV-sugemalimab heavy chain
GAPAQLPCSPTIPLQDLSLLRRAGVTWQHQPDSGPPAAAPGHPLAPGPHPAAPSSWGPRPRRYTVLSVGPGGLRSGRLPLQPRVQLDERGRQRGDFSLWLRPARRADAGEYRAAVHLRDRALSCRLRLRLGQASMTASPPGSLRASDWVILNCSFSRPDRPASVHWFRNRGQGRVPVRESPHHHLAESFLFLPQVSPMDSGPWGCILTYRDGFNVSIMYNLTVLGLEPPTPLTVYAGAGSRVGLPCRLPAGVGTRSFLTAKWTPPGGGPDLLVTGDNGDFTLRLEDVSQAQAGTYTCHIHLQEQQLNGGGGGSGGGGSGGGGSGGGGSGAPLKIQAYFNETADLPCQFANSQNQSLSELVVFWQDQENLVLNEVYLGKEKFDSVHSKYMGRTSFDSDSWTLRLHNLQIKDKGLYQCIIHHKKPTGMIRIHQMNSELSVLGGGGSGGGGSGGGGSGGGGSGEVQLLESGGGLVQPGGSLRLSCAASGFTFSSYAMSWVRQAPGKGLEWVSGISGSGGFTYYADSVKGRFTISRDNSKNTLYLQMNSLRAEDTAVYYCAKPPRGYNYGPFDYWGQGTLVTVSSASTKGPSVFPLAPCSRSTSESTAALGCLVKDYFPEPVTVSWNSGALTSGVHTFPAVLQSSGLYSLSSVVTVPSSSLGTKTYTCNVDHKPSNTKVDKRVESKYGPPCPPCPAPEFLGGPSVFLFPPKPKDTLMISRTPEVTCVVVDVSQEDPEVQFNWYVDGVEVHNAKTKPREEQFNSTYRVVSVLTVLHQDWLNGKEYKCKVSNKGLPSSIEKTISKAKGQPREPQVYTLPPSQEEMTKNQVSLTCLVKGFYPSDIAVEWESNGQPENNYKTTPPVLDSDGSFFLYSRLTVDKSRWQEGNVFSCSVMHEALHNHYTQKSLSLSLGA

SEQ ID NO: 134 - protein, 817 aa, synthetic construct
  REGION 1..817: note = LAG3 D1/D2-CD86 IgV-sugemalimab heavy chain
GAPAQLPCSPTIPLQDLSLLRRAGVTWQHQPDSGPPAAAPGHPLAPGPHPAAPSSWGPRPRRYTVLSVGPGGLRSGRLPLQPRVQLDERGRQRGDFSLWLRPARRADAGEYRAAVHLRDRALSCRLRLRLGQASMTASPPGSLRASDWVILNCSFSRPDRPASVHWFRNRGQGRVPVRESPHHHLAESFLFLPQVSPMDSGPWGCILTYRDGFNVSGGGGGSGGGGSGGGGSGGGGSGAPLKIQAYFNETADLPCQFANSQNQSLSELVVFWQDQENLVLNEVYLGKEKFDSVHSKYMGRTSFDSDSWTLRLHNLQIKDKGLYQCIIHHKKPTGMIRIHQMNSELSVLGGGGSGGGGSGGGGSGGGGSGEVQLLESGGGLVQPGGSLRLSCAASGFTFSSYAMSWVRQAPGKGLEWVSGISGSGGFTYYADSVKGRFTISRDNSKNTLYLQMNSLRAEDTAVYYCAKPPRGYNYGPFDYWGQGTLVTVSSASTKGPSVFPLAPCSRSTSESTAALGCLVKDYFPEPVTVSWNSGALTSGVHTFPAVLQSSGLYSLSSVVTVPSSSLGTKTYTCNVDHKPSNTKVDKRVESKYGPPCPPCPAPEFLGGPSVFLFPPKPKDTLMISRTPEVTCVVVDVSQEDPEVQFNWYVDGVEVHNAKTKPREEQFNSTYRVVSVLTVLHQDWLNGKEYKCKVSNKGLPSSIEKTISKAKGQPREPQVYTLPPSQEEMTKNQVSLTCLVKGFYPSDIAVEWESNGQPENNYKTTPPVLDSDGSFFLYSRLTVDKSRWQEGNVFSCSVMHEALHNHYTQKSLSLSLGA

SEQ ID NO: 135 - protein, 732 aa, synthetic construct
  REGION 1..732: note = LAG3 IgD1-CD86 IgV-sugemalimab heavy chain
GAPAQLPCSPTIPLQDLSLLRRAGVTWQHQPDSGPPAAAPGHPLAPGPHPAAPSSWGPRPRRYTVLSVGPGGLRSGRLPLQPRVQLDERGRQRGDFSLWLRPARRADAGEYRAAVHLRDRALSCRLRLRLGGGGGGSGGGGSGGGGSGGGGSGAPLKIQAYFNETADLPCQFANSQNQSLSELVVFWQDQENLVLNEVYLGKEKFDSVHSKYMGRTSFDSDSWTLRLHNLQIKDKGLYQCIIHHKKPTGMIRIHQMNSELSVLGGGGSGGGGSGGGGSGGGGSGEVQLLESGGGLVQPGGSLRLSCAASGFTFSSYAMSWVRQAPGKGLEWVSGISGSGGFTYYADSVKGRFTISRDNSKNTLYLQMNSLRAEDTAVYYCAKPPRGYNYGPFDYWGQGTLVTVSSASTKGPSVFPLAPCSRSTSESTAALGCLVKDYFPEPVTVSWNSGALTSGVHTFPAVLQSSGLYSLSSVVTVPSSSLGTKTYTCNVDHKPSNTKVDKRVESKYGPPCPPCPAPEFLGGPSVFLFPPKPKDTLMISRTPEVTCVVVDVSQEDPEVQFNWYVDGVEVHNAKTKPREEQFNSTYRVVSVLTVLHQDWLNGKEYKCKVSNKGLPSSIEKTISKAKGQPREPQVYTLPPSQEEMTKNQVSLTCLVKGFYPSDIAVEWESNGQPENNYKTTPPVLDSDGSFFLYSRLTVDKSRWQEGNVFSCSVMHEALHNHYTQKSLSLSLGA

SEQ ID NO: 136 - protein, 663 aa, synthetic construct
  REGION 1..663: note = LAG3-sugemalimab light chain
LQPGAEVPVVWAQEGAPAQLPCSPTIPLQDLSLLRRAGVTWQHQPDSGPPAAAPGHPLAPGPHPAAPSSWGPRPRRYTVLSVGPGGLRSGRLPLQPRVQLDERGRQRGDFSLWLRPARRADAGEYRAAVHLRDRALSCRLRLRLGQASMTASPPGSLRASDWVILNCSFSRPDRPASVHWFRNRGQGRVPVRESPHHHLAESFLFLPQVSPMDSGPWGCILTYRDGFNVSIMYNLTVLGLEPPTPLTVYAGAGSRVGLPCRLPAGVGTRSFLTAKWTPPGGGPDLLVTGDNGDFTLRLEDVSQAQAGTYTCHIHLQEQQLNATVTLAIITVTPKSFGSPGSLGKLLCEVTPVSGQERFVWSSLDTPSQRSFSGPWLEAQEAQLLSQPWQCQLYQGERLLGAAVYFTELSSPGAQRSGRAPGALPAGHLGGGGSGGGGSGGGGSGGGGSGSYVLTQPPSVSVAPGQTARITCGGNNIGSKSVHWYQQKPGQAPVLVVYDDSDRPSGIPERFSGSNSGNTATLTISRVEAGDEADYYCQVWDSSSDHVVFGGGTKLTVLGQPKAAPSVTLFPPSSEELQANKATLVCLISDFYPGAVTVAWKADSSPVKAGVETTTPSKQSNNKYAASSYLSLTPEQWKSHRSYSCQVTHEGSTVEKTVAPTECS

SEQ ID NO: 137 - protein, 542 aa, synthetic construct
  REGION 1..542: note = LAG3 D1/D2/D3-sugemalimab light chain
GAPAQLPCSPTIPLQDLSLLRRAGVTWQHQPDSGPPAAAPGHPLAPGPHPAAPSSWGPRPRRYTVLSVGPGGLRSGRLPLQPRVQLDERGRQRGDFSLWLRPARRADAGEYRAAVHLRDRALSCRLRLRLGQASMTASPPGSLRASDWVILNCSFSRPDRPASVHWFRNRGQGRVPVRESPHHHLAESFLFLPQVSPMDSGPWGCILTYRDGFNVSIMYNLTVLGLEPPTPLTVYAGAGSRVGLPCRLPAGVGTRSFLTAKWTPPGGGPDLLVTGDNGDFTLRLEDVSQAQAGTYTCHIHLQEQQLNGGGGSGGGGSGGGGSGGGGSGSYVLTQPPSVSVAPGQTARITCGGNNIGSKSVHWYQQKPGQAPVLVVYDDSDRPSGIPERFSGSNSGNTATLTISRVEAGDEADYYCQVWDSSSDHVVFGGGTKLTVLGQPKAAPSVTLFPPSSEELQANKATLVCLISDFYPGAVTVAWKADSSPVKAGVETTTPSKQSNNKYAASSYLSLTPEQWKSHRSYSCQVTHEGSTVEKTVAPTECS

SEQ ID NO: 138 - protein, 451 aa, synthetic construct
  REGION 1..451: note = LAG3 D1/D2-sugemalimab light chain
GAPAQLPCSPTIPLQDLSLLRRAGVTWQHQPDSGPPAAAPGHPLAPGPHPAAPSSWGPRPRRYTVLSVGPGGLRSGRLPLQPRVQLDERGRQRGDFSLWLRPARRADAGEYRAAVHLRDRALSCRLRLRLGQASMTASPPGSLRASDWVILNCSFSRPDRPASVHWFRNRGQGRVPVRESPHHHLAESFLFLPQVSPMDSGPWGCILTYRDGFNVSGGGGSGGGGSGGGGSGGGGSGSYVLTQPPSVSVAPGQTARITCGGNNIGSKSVHWYQQKPGQAPVLVVYDDSDRPSGIPERFSGSNSGNTATLTISRVEAGDEADYYCQVWDSSSDHVVFGGGTKLTVLGQPKAAPSVTLFPPSSEELQANKATLVCLISDFYPGAVTVAWKADSSPVKAGVETTTPSKQSNNKYAASSYLSLTPEQWKSHRSYSCQVTHEGSTVEKTVAPTECS

SEQ ID NO: 139 - protein, 366 aa, synthetic construct
  REGION 1..366: note = LAG3 IgD1-sugemalimab light chain
GAPAQLPCSPTIPLQDLSLLRRAGVTWQHQPDSGPPAAAPGHPLAPGPHPAAPSSWGPRPRRYTVLSVGPGGLRSGRLPLQPRVQLDERGRQRGDFSLWLRPARRADAGEYRAAVHLRDRALSCRLRLRLGGGGGSGGGGSGGGGSGGGGSGSYVLTQPPSVSVAPGQTARITCGGNNIGSKSVHWYQQKPGQAPVLVVYDDSDRPSGIPERFSGSNSGNTATLTISRVEAGDEADYYCQVWDSSSDHVVFGGGTKLTVLGQPKAAPSVTLFPPSSEELQANKATLVCLISDFYPGAVTVAWKADSSPVKAGVETTTPSKQSNNKYAASSYLSLTPEQWKSHRSYSCQVTHEGSTVEKTVAPTECS

SEQ ID NO: 140 - protein, 663 aa, synthetic construct
  REGION 1..663: note = sugemalimab light chain -LAG3
SYVLTQPPSVSVAPGQTARITCGGNNIGSKSVHWYQQKPGQAPVLVVYDDSDRPSGIPERFSGSNSGNTATLTISRVEAGDEADYYCQVWDSSSDHVVFGGGTKLTVLGQPKAAPSVTLFPPSSEELQANKATLVCLISDFYPGAVTVAWKADSSPVKAGVETTTPSKQSNNKYAASSYLSLTPEQWKSHRSYSCQVTHEGSTVEKTVAPTECSGGGGSGGGGSGGGGSGGGGSGLQPGAEVPVVWAQEGAPAQLPCSPTIPLQDLSLLRRAGVTWQHQPDSGPPAAAPGHPLAPGPHPAAPSSWGPRPRRYTVLSVGPGGLRSGRLPLQPRVQLDERGRQRGDFSLWLRPARRADAGEYRAAVHLRDRALSCRLRLRLGQASMTASPPGSLRASDWVILNCSFSRPDRPASVHWFRNRGQGRVPVRESPHHHLAESFLFLPQVSPMDSGPWGCILTYRDGFNVSIMYNLTVLGLEPPTPLTVYAGAGSRVGLPCRLPAGVGTRSFLTAKWTPPGGGPDLLVTGDNGDFTLRLEDVSQAQAGTYTCHIHLQEQQLNATVTLAIITVTPKSFGSPGSLGKLLCEVTPVSGQERFVWSSLDTPSQRSFSGPWLEAQEAQLLSQPWQCQLYQGERLLGAAVYFTELSSPGAQRSGRAPGALPAGHL

SEQ ID NO: 141 - protein, 542 aa, synthetic construct
  REGION 1..542: note = sugemalimab light chain -LAG3 D1/D2/D3
SYVLTQPPSVSVAPGQTARITCGGNNIGSKSVHWYQQKPGQAPVLVVYDDSDRPSGIPERFSGSNSGNTATLTISRVEAGDEADYYCQVWDSSSDHVVFGGGTKLTVLGQPKAAPSVTLFPPSSEELQANKATLVCLISDFYPGAVTVAWKADSSPVKAGVETTTPSKQSNNKYAASSYLSLTPEQWKSHRSYSCQVTHEGSTVEKTVAPTECSGGGGSGGGGSGGGGSGGGGSGGAPAQLPCSPTIPLQDLSLLRRAGVTWQHQPDSGPPAAAPGHPLAPGPHPAAPSSWGPRPRRYTVLSVGPGGLRSGRLPLQPRVQLDERGRQRGDFSLWLRPARRADAGEYRAAVHLRDRALSCRLRLRLGQASMTASPPGSLRASDWVILNCSFSRPDRPASVHWFRNRGQGRVPVRESPHHHLAESFLFLPQVSPMDSGPWGCILTYRDGFNVSIMYNLTVLGLEPPTPLTVYAGAGSRVGLPCRLPAGVGTRSFLTAKWTPPGGGPDLLVTGDNGDFTLRLEDVSQAQAGTYTCHIHLQEQQLN

SEQ ID NO: 142 - protein, 451 aa, synthetic construct
  REGION 1..451: note = sugemalimab light chain -LAG3 D1/D2
SYVLTQPPSVSVAPGQTARITCGGNNIGSKSVHWYQQKPGQAPVLVVYDDSDRPSGIPERFSGSNSGNTATLTISRVEAGDEADYYCQVWDSSSDHVVFGGGTKLTVLGQPKAAPSVTLFPPSSEELQANKATLVCLISDFYPGAVTVAWKADSSPVKAGVETTTPSKQSNNKYAASSYLSLTPEQWKSHRSYSCQVTHEGSTVEKTVAPTECSGGGGSGGGGSGGGGSGGGGSGGAPAQLPCSPTIPLQDLSLLRRAGVTWQHQPDSGPPAAAPGHPLAPGPHPAAPSSWGPRPRRYTVLSVGPGGLRSGRLPLQPRVQLDERGRQRGDFSLWLRPARRADAGEYRAAVHLRDRALSCRLRLRLGQASMTASPPGSLRASDWVILNCSFSRPDRPASVHWFRNRGQGRVPVRESPHHHLAESFLFLPQVSPMDSGPWGCILTYRDGFNVS

SEQ ID NO: 143 - protein, 366 aa, synthetic construct
  REGION 1..366: note = sugemalimab light chain -LAG3 IgD1
SYVLTQPPSVSVAPGQTARITCGGNNIGSKSVHWYQQKPGQAPVLVVYDDSDRPSGIPERFSGSNSGNTATLTISRVEAGDEADYYCQVWDSSSDHVVFGGGTKLTVLGQPKAAPSVTLFPPSSEELQANKATLVCLISDFYPGAVTVAWKADSSPVKAGVETTTPSKQSNNKYAASSYLSLTPEQWKSHRSYSCQVTHEGSTVEKTVAPTECSGGGGSGGGGSGGGGSGGGGSGGAPAQLPCSPTIPLQDLSLLRRAGVTWQHQPDSGPPAAAPGHPLAPGPHPAAPSSWGPRPRRYTVLSVGPGGLRSGRLPLQPRVQLDERGRQRGDFSLWLRPARRADAGEYRAAVHLRDRALSCRLRLRLG

SEQ ID NO: 144 - protein, 897 aa, synthetic construct
  REGION 1..897: note = LAG3-sugemalimab heavy chain
LQPGAEVPVVWAQEGAPAQLPCSPTIPLQDLSLLRRAGVTWQHQPDSGPPAAAPGHPLAPGPHPAAPSSWGPRPRRYTVLSVGPGGLRSGRLPLQPRVQLDERGRQRGDFSLWLRPARRADAGEYRAAVHLRDRALSCRLRLRLGQASMTASPPGSLRASDWVILNCSFSRPDRPASVHWFRNRGQGRVPVRESPHHHLAESFLFLPQVSPMDSGPWGCILTYRDGFNVSIMYNLTVLGLEPPTPLTVYAGAGSRVGLPCRLPAGVGTRSFLTAKWTPPGGGPDLLVTGDNGDFTLRLEDVSQAQAGTYTCHIHLQEQQLNATVTLAIITVTPKSFGSPGSLGKLLCEVTPVSGQERFVWSSLDTPSQRSFSGPWLEAQEAQLLSQPWQCQLYQGERLLGAAVYFTELSSPGAQRSGRAPGALPAGHLGGGGSGGGGSGGGGSGGGGSGEVQLLESGGGLVQPGGSLRLSCAASGFTFSSYAMSWVRQAPGKGLEWVSGISGSGGFTYYADSVKGRFTISRDNSKNTLYLQMNSLRAEDTAVYYCAKPPRGYNYGPFDYWGQGTLVTVSSASTKGPSVFPLAPCSRSTSESTAALGCLVKDYFPEPVTVSWNSGALTSGVHTFPAVLQSSGLYSLSSVVTVPSSSLGTKTYTCNVDHKPSNTKVDKRVESKYGPPCPPCPAPEFLGGPSVFLFPPKPKDTLMISRTPEVTCVVVDVSQEDPEVQFNWYVDGVEVHNAKTKPREEQFNSTYRVVSVLTVLHQDWLNGKEYKCKVSNKGLPSSIEKTISKAKGQPREPQVYTLPPSQEEMTKNQVSLTCLVKGFYPSDIAVEWESNGQPENNYKTTPPVLDSDGSFFLYSRLTVDKSRWQEGNVFSCSVMHEALHNHYTQKSLSLSLGK

SEQ ID NO: 145 - protein, 776 aa, synthetic construct
  REGION 1..776: note = LAG3 D1/D2/D3-sugemalimab heavy chain
GAPAQLPCSPTIPLQDLSLLRRAGVTWQHQPDSGPPAAAPGHPLAPGPHPAAPSSWGPRPRRYTVLSVGPGGLRSGRLPLQPRVQLDERGRQRGDFSLWLRPARRADAGEYRAAVHLRDRALSCRLRLRLGQASMTASPPGSLRASDWVILNCSFSRPDRPASVHWFRNRGQGRVPVRESPHHHLAESFLFLPQVSPMDSGPWGCILTYRDGFNVSIMYNLTVLGLEPPTPLTVYAGAGSRVGLPCRLPAGVGTRSFLTAKWTPPGGGPDLLVTGDNGDFTLRLEDVSQAQAGTYTCHIHLQEQQLNGGGGSGGGGSGGGGSGGGGSGEVQLLESGGGLVQPGGSLRLSCAASGFTFSSYAMSWVRQAPGKGLEWVSGISGSGGFTYYADSVKGRFTISRDNSKNTLYLQMNSLRAEDTAVYYCAKPPRGYNYGPFDYWGQGTLVTVSSASTKGPSVFPLAPCSRSTSESTAALGCLVKDYFPEPVTVSWNSGALTSGVHTFPAVLQSSGLYSLSSVVTVPSSSLGTKTYTCNVDHKPSNTKVDKRVESKYGPPCPPCPAPEFLGGPSVFLFPPKPKDTLMISRTPEVTCVVVDVSQEDPEVQFNWYVDGVEVHNAKTKPREEQFNSTYRVVSVLTVLHQDWLNGKEYKCKVSNKGLPSSIEKTISKAKGQPREPQVYTLPPSQEEMTKNQVSLTCLVKGFYPSDIAVEWESNGQPENNYKTTPPVLDSDGSFFLYSRLTVDKSRWQEGNVFSCSVMHEALHNHYTQKSLSLSLGK

SEQ ID NO: 146 - protein, 685 aa, synthetic construct
  REGION 1..685: note = LAG3 D1/D2-sugemalimab heavy chain
GAPAQLPCSPTIPLQDLSLLRRAGVTWQHQPDSGPPAAAPGHPLAPGPHPAAPSSWGPRPRRYTVLSVGPGGLRSGRLPLQPRVQLDERGRQRGDFSLWLRPARRADAGEYRAAVHLRDRALSCRLRLRLGQASMTASPPGSLRASDWVILNCSFSRPDRPASVHWFRNRGQGRVPVRESPHHHLAESFLFLPQVSPMDSGPWGCILTYRDGFNVSGGGGSGGGGSGGGGSGGGGSGEVQLLESGGGLVQPGGSLRLSCAASGFTFSSYAMSWVRQAPGKGLEWVSGISGSGGFTYYADSVKGRFTISRDNSKNTLYLQMNSLRAEDTAVYYCAKPPRGYNYGPFDYWGQGTLVTVSSASTKGPSVFPLAPCSRSTSESTAALGCLVKDYFPEPVTVSWNSGALTSGVHTFPAVLQSSGLYSLSSVVTVPSSSLGTKTYTCNVDHKPSNTKVDKRVESKYGPPCPPCPAPEFLGGPSVFLFPPKPKDTLMISRTPEVTCVVVDVSQEDPEVQFNWYVDGVEVHNAKTKPREEQFNSTYRVVSVLTVLHQDWLNGKEYKCKVSNKGLPSSIEKTISKAKGQPREPQVYTLPPSQEEMTKNQVSLTCLVKGFYPSDIAVEWESNGQPENNYKTTPPVLDSDGSFFLYSRLTVDKSRWQEGNVFSCSVMHEALHNHYTQKSLSLSLGK

SEQ ID NO: 147 - protein, 600 aa, synthetic construct
  REGION 1..600: note = LAG3 IgD1-sugemalimab heavy chain
GAPAQLPCSPTIPLQDLSLLRRAGVTWQHQPDSGPPAAAPGHPLAPGPHPAAPSSWGPRPRRYTVLSVGPGGLRSGRLPLQPRVQLDERGRQRGDFSLWLRPARRADAGEYRAAVHLRDRALSCRLRLRLGGGGGSGGGGSGGGGSGGGGSGEVQLLESGGGLVQPGGSLRLSCAASGFTFSSYAMSWVRQAPGKGLEWVSGISGSGGFTYYADSVKGRFTISRDNSKNTLYLQMNSLRAEDTAVYYCAKPPRGYNYGPFDYWGQGTLVTVSSASTKGPSVFPLAPCSRSTSESTAALGCLVKDYFPEPVTVSWNSGALTSGVHTFPAVLQSSGLYSLSSVVTVPSSSLGTKTYTCNVDHKPSNTKVDKRVESKYGPPCPPCPAPEFLGGPSVFLFPPKPKDTLMISRTPEVTCVVVDVSQEDPEVQFNWYVDGVEVHNAKTKPREEQFNSTYRVVSVLTVLHQDWLNGKEYKCKVSNKGLPSSIEKTISKAKGQPREPQVYTLPPSQEEMTKNQVSLTCLVKGFYPSDIAVEWESNGQPENNYKTTPPVLDSDGSFFLYSRLTVDKSRWQEGNVFSCSVMHEALHNHYTQKSLSLSLGK

SEQ ID NO: 148 - protein, 897 aa, synthetic construct
  REGION 1..897: note = sugemalimab heavy chain -LAG3
EVQLLESGGGLVQPGGSLRLSCAASGFTFSSYAMSWVRQAPGKGLEWVSGISGSGGFTYYADSVKGRFTISRDNSKNTLYLQMNSLRAEDTAVYYCAKPPRGYNYGPFDYWGQGTLVTVSSASTKGPSVFPLAPCSRSTSESTAALGCLVKDYFPEPVTVSWNSGALTSGVHTFPAVLQSSGLYSLSSVVTVPSSSLGTKTYTCNVDHKPSNTKVDKRVESKYGPPCPPCPAPEFLGGPSVFLFPPKPKDTLMISRTPEVTCVVVDVSQEDPEVQFNWYVDGVEVHNAKTKPREEQFNSTYRVVSVLTVLHQDWLNGKEYKCKVSNKGLPSSIEKTISKAKGQPREPQVYTLPPSQEEMTKNQVSLTCLVKGFYPSDIAVEWESNGQPENNYKTTPPVLDSDGSFFLYSRLTVDKSRWQEGNVFSCSVMHEALHNHYTQKSLSLSLGAGGGGSGGGGSGGGGSGGGGSGLQPGAEVPVVWAQEGAPAQLPCSPTIPLQDLSLLRRAGVTWQHQPDSGPPAAAPGHPLAPGPHPAAPSSWGPRPRRYTVLSVGPGGLRSGRLPLQPRVQLDERGRQRGDFSLWLRPARRADAGEYRAAVHLRDRALSCRLRLRLGQASMTASPPGSLRASDWVILNCSFSRPDRPASVHWFRNRGQGRVPVRESPHHHLAESFLFLPQVSPMDSGPWGCILTYRDGFNVSIMYNLTVLGLEPPTPLTVYAGAGSRVGLPCRLPAGVGTRSFLTAKWTPPGGGPDLLVTGDNGDFTLRLEDVSQAQAGTYTCHIHLQEQQLNATVTLAIITVTPKSFGSPGSLGKLLCEVTPVSGQERFVWSSLDTPSQRSFSGPWLEAQEAQLLSQPWQCQLYQGERLLGAAVYFTELSSPGAQRSGRAPGALPAGHL

SEQ ID NO: 149 - protein, 776 aa, synthetic construct
  REGION 1..776: note = sugemalimab heavy chain -LAG3 D1/D2/D3
EVQLLESGGGLVQPGGSLRLSCAASGFTFSSYAMSWVRQAPGKGLEWVSGISGSGGFTYYADSVKGRFTISRDNSKNTLYLQMNSLRAEDTAVYYCAKPPRGYNYGPFDYWGQGTLVTVSSASTKGPSVFPLAPCSRSTSESTAALGCLVKDYFPEPVTVSWNSGALTSGVHTFPAVLQSSGLYSLSSVVTVPSSSLGTKTYTCNVDHKPSNTKVDKRVESKYGPPCPPCPAPEFLGGPSVFLFPPKPKDTLMISRTPEVTCVVVDVSQEDPEVQFNWYVDGVEVHNAKTKPREEQFNSTYRVVSVLTVLHQDWLNGKEYKCKVSNKGLPSSIEKTISKAKGQPREPQVYTLPPSQEEMTKNQVSLTCLVKGFYPSDIAVEWESNGQPENNYKTTPPVLDSDGSFFLYSRLTVDKSRWQEGNVFSCSVMHEALHNHYTQKSLSLSLGAGGGGSGGGGSGGGGSGGGGSGGAPAQLPCSPTIPLQDLSLLRRAGVTWQHQPDSGPPAAAPGHPLAPGPHPAAPSSWGPRPRRYTVLSVGPGGLRSGRLPLQPRVQLDERGRQRGDFSLWLRPARRADAGEYRAAVHLRDRALSCRLRLRLGQASMTASPPGSLRASDWVILNCSFSRPDRPASVHWFRNRGQGRVPVRESPHHHLAESFLFLPQVSPMDSGPWGCILTYRDGFNVSIMYNLTVLGLEPPTPLTVYAGAGSRVGLPCRLPAGVGTRSFLTAKWTPPGGGPDLLVTGDNGDFTLRLEDVSQAQAGTYTCHIHLQEQQLN

SEQ ID NO: 150 - protein, 685 aa, synthetic construct
  REGION 1..685: note = sugemalimab heavy chain -LAG3 D1/D2
EVQLLESGGGLVQPGGSLRLSCAASGFTFSSYAMSWVRQAPGKGLEWVSGISGSGGFTYYADSVKGRFTISRDNSKNTLYLQMNSLRAEDTAVYYCAKPPRGYNYGPFDYWGQGTLVTVSSASTKGPSVFPLAPCSRSTSESTAALGCLVKDYFPEPVTVSWNSGALTSGVHTFPAVLQSSGLYSLSSVVTVPSSSLGTKTYTCNVDHKPSNTKVDKRVESKYGPPCPPCPAPEFLGGPSVFLFPPKPKDTLMISRTPEVTCVVVDVSQEDPEVQFNWYVDGVEVHNAKTKPREEQFNSTYRVVSVLTVLHQDWLNGKEYKCKVSNKGLPSSIEKTISKAKGQPREPQVYTLPPSQEEMTKNQVSLTCLVKGFYPSDIAVEWESNGQPENNYKTTPPVLDSDGSFFLYSRLTVDKSRWQEGNVFSCSVMHEALHNHYTQKSLSLSLGAGGGGSGGGGSGGGGSGGGGSGGAPAQLPCSPTIPLQDLSLLRRAGVTWQHQPDSGPPAAAPGHPLAPGPHPAAPSSWGPRPRRYTVLSVGPGGLRSGRLPLQPRVQLDERGRQRGDFSLWLRPARRADAGEYRAAVHLRDRALSCRLRLRLGQASMTASPPGSLRASDWVILNCSFSRPDRPASVHWFRNRGQGRVPVRESPHHHLAESFLFLPQVSPMDSGPWGCILTYRDGFNVS

SEQ ID NO: 151 - protein, 600 aa, synthetic construct
  REGION 1..600: note = sugemalimab heavy chain -LAG3 IgD1
EVQLLESGGGLVQPGGSLRLSCAASGFTFSSYAMSWVRQAPGKGLEWVSGISGSGGFTYYADSVKGRFTISRDNSKNTLYLQMNSLRAEDTAVYYCAKPPRGYNYGPFDYWGQGTLVTVSSASTKGPSVFPLAPCSRSTSESTAALGCLVKDYFPEPVTVSWNSGALTSGVHTFPAVLQSSGLYSLSSVVTVPSSSLGTKTYTCNVDHKPSNTKVDKRVESKYGPPCPPCPAPEFLGGPSVFLFPPKPKDTLMISRTPEVTCVVVDVSQEDPEVQFNWYVDGVEVHNAKTKPREEQFNSTYRVVSVLTVLHQDWLNGKEYKCKVSNKGLPSSIEKTISKAKGQPREPQVYTLPPSQEEMTKNQVSLTCLVKGFYPSDIAVEWESNGQPENNYKTTPPVLDSDGSFFLYSRLTVDKSRWQEGNVFSCSVMHEALHNHYTQKSLSLSLGAGGGGSGGGGSGGGGSGGGGSGGAPAQLPCSPTIPLQDLSLLRRAGVTWQHQPDSGPPAAAPGHPLAPGPHPAAPSSWGPRPRRYTVLSVGPGGLRSGRLPLQPRVQLDERGRQRGDFSLWLRPARRADAGEYRAAVHLRDRALSCRLRLRLG

SEQ ID NO: 152 - DNA, 1401 bp, synthetic construct
  misc_feature 1..1401: note = sugemalimab heavy chain polynucleotide
  source 1..1401: mol_type = other DNA
atgcacagctcagcactgctctgttgcctggtcctcctgactggggtgagggccgaggtgcagctgctggagagcggggggggactggtgcagccaggaggaagcctgagactgagctgtgccgccagcgggtttacatttagcagctatgccatgagctgggtgagacaggcccctggcaaaggcctggagtgggtgagcggaatctccggcagcgggggatttacatactacgccgatagtgtgaagggcagatttacaatcagcagagacaacagcaagaacacactgtacctgcagatgaacagcctgagagccgaggacaccgccgtgtactattgcgccaagccccccagaggatataactacggacccttcgactactggggacagggcaccctggtgacagtgtccagcgctagcaccaagggcccatcggtcttccccctggcgccctgctccaggagcacctccgagagcacagccgccctgggctgcctggtcaaggactacttccccgaaccggtgacggtgtcgtggaactcaggcgccctgaccagcggcgtgcacaccttcccggctgtcctacagtcctcaggactctactccctcagcagcgtggtgaccgtgccctccagcagcttgggcacgaagacctacacctgcaacgtagatcacaagcccagcaacaccaaggtggacaagagagttgagtccaaatatggtcccccatgcccaccatgcccagcacctgagttcctggggggaccatcagtcttcctgttccccccaaaacccaaggacactctcatgatctcccggacccctgaggtcacgtgcgtggtggtggacgtgagccaggaagaccccgaggtccagttcaactggtacgtggatggcgtggaggtgcataatgccaagacaaagccgcgggaggagcagttcaacagcacgtaccgtgtggtcagcgtcctcaccgtcctgcaccaggactggctgaacggcaaggagtacaagtgcaaggtctccaacaaaggcctcccgtcctccatcgagaaaaccatctccaaagccaaagggcagccccgagagccacaggtgtacaccctgcccccatcccaggaggagatgaccaagaaccaggtcagcctgacctgcctggtcaaaggcttctaccccagcgacatcgccgtggagtgggagagcaatgggcagccggagaacaactacaagaccacgcctcccgtgctggactccgacggctccttcttcctctacagcaggctaaccgtggacaagagcaggtggcaggaggggaatgtcttctcatgctccgtgatgcatgaggctctgcacaaccactacacacagaagagcctctccctgtctctgggtaaatga

SEQ ID NO: 153 - DNA, 702 bp, synthetic construct
  misc_feature 1..702: note = sugemalimab light chain polynucleotide
  source 1..702: mol_type = other DNA
atgggttggagttgcatcatcctatttctagtcgctaccgctacaggagtgcacagcagctacgtgctgacccaacctccatctgtttccgtcgcccctggacagaccgccagaatcacctgtggcggcaataacatcggctctaagtccgtgcactggtaccagcagaagcctggccaggctcctgtgctggtcgtgtacgacgactctgaccggccttctggcatccctgagcggttttctggcagcaactccggcaacaccgccaccctcaccatctctagagtggaagctggcgacgaggccgactactactgccaggtgtgggattccagctccgatcacgtggtgttcggcggaggcaccaagctgaccgtgctgggccagcctaaggctgctccctctgtgaccctgttcccccccagctccgaggaactgcaggccaacaaagccaccctggtgtgcctgatctccgacttctaccctggcgccgtgacagtggcttggaaagctgattcttctccagtgaaggccggcgtggaaaccaccacaccttcgaagcagtccaacaacaagtacgccgcctcctcttacctgtccctgacacccgagcagtggaagtctcatagatcctattcctgccaagtgacccacgagggctccaccgtggagaagaccgtggcccctaccgagtgctcctga

SEQ ID NO: 154 - DNA, 2082 bp, synthetic construct
  misc_feature 1..2082: note = CD86-sugemalimab heavy chain polynucleotide
  source 1..2082: mol_type = other DNA
gcaccattgaaaattcaagcatacttcaatgagacggccgatctgccctgtcagttcgctaacagccagaaccaatcactgagcgaactggtggtattttggcaagatcaggagaacctggtcctcaatgaggtgtacctcggcaaggaaaaatttgacagtgttcactcaaaatatatgggcagaacaagttttgactccgattcctggactctgagactgcacaacctccaaatcaaggacaaaggtttgtaccagtgtatcattcatcacaagaagcctaccggaatgataaggattcatcagatgaatagcgagctcagcgtcttggccaacttcagccagcctgagattgtcccaatcagcaatatcaccgagaacgtgtatattaatttgacctgtagctcaatccatggttacccggaaccaaaaaagatgagcgtccttctgcgcacaaaaaacagtactattgaatatgatggggtcatgcagaagagtcaagataatgttacagagctctacgatgtatctatctccctcagtgtgagctttccagatgtgacatccaatatgaccatattttgcatcctcgagacagacaaaacccgcctgctgagttcacctttctccatcgaacttgaagacccccagcccccacctgaccatattccggctggtggcggcggaagcggcggtggtgggtcaggaggcggaggatccggggggggcggatcaggtgaggttcagctgctggaaagcgggggagggctggtccagcccgggggatccctccggctgtcatgcgcggcgtcaggctttactttctcctcctatgctatgagttgggttaggcaggcccccggtaagggattggagtgggtgtcaggaatctccgggagtggaggatttacctattatgcagattctgtgaagggcagattcacaatctctcgggacaatagtaaaaacactctgtacctgcagatgaactccctgagggctgaagacactgcagtctactattgcgccaagccacctaggggatacaattacggtcccttcgattactggggacagggaacactggtgacagtgtctagcgcaagcaccaaggggcccagtgtctttccgctggccccctgttccagatctaccagcgaaagtacagccgccctcggttgtttggttaaagactatttccccgagcctgtgaccgtgagttggaatagcggcgccctgaccagcggcgtacatacctttcctgcagtactgcagtcatccggcctgtactccttgtccagcgtggtcaccgttccatcctctagcctggggaccaagacctatacctgcaacgtcgaccacaagccctctaatacaaaagtggacaagcgggtcgagagcaagtacggacctccctgccccccttgcccagcaccagaattcctcggaggacctagcgtgtttctctttcctcccaagccgaaggatacattgatgatctctagaaccccagaagttacgtgcgtggtcgttgacgtgtctcaggaggatcctgaggtgcagttcaattggtatgttgacggggtcgaagttcacaacgccaagaccaagccccgggaagagcagttcaactcaacctacagggtggtatccgtgctgacagtgctgcatcaggactggctgaatggaaaggaatacaagtgcaaggtgagcaataaggggctgccgtccagcattgagaagactatcagcaaggcaaaagggcagcctagggagccacaggtgtacacactccccccatcccaggaggaaatgacaaaaaaccaagtgagcctgacgtgccttgtgaaaggattctatccaagtgacatcgccgtggaatgggagagcaacggccagcccgagaacaactacaaaactactccccctgttctggactctgacgggagtttctttctttattcccggctcaccgtggacaagtcacgctggcaggaaggaaacgtgttctcatgttcagtcatgcacgaagcactccacaaccactatacacaaaagtctctgagtctcagcctgggaaag

SEQ ID NO: 155 - DNA, 2079 bp, synthetic construct
  misc_feature 1..2079: note = sugemalimab heavy chain -CD86 polynucleotide
  source 1..2079: mol_type = other DNA
gaagttcaactgttggaatcaggtggaggtctcgtgcaacctggcggatccttgcgccttagctgtgcagccagtggcttcacttttagctcttacgctatgtcctgggtccggcaagctccaggaaaggggctggagtgggttagcggcatttccggttcaggcgggttcacgtactatgctgattcagtgaagggtagattcaccatcagccgcgacaacagtaagaacacactgtatctccagatgaactccttgagagctgaagacaccgccgtgtactactgtgccaagccaccccggggctacaactatggccccttcgactactggggacaggggacactcgtcactgtgagcagcgcctctactaaggggccatctgtgtttcccctggccccgtgttctcgcagcacttctgaaagtaccgccgccttgggctgcctcgtgaaagattactttcctgagcctgtcacggtctcttggaactccggcgctttgacttctggtgtgcatacctttcccgctgtgctccagtccagtggactgtacagcctgagctccgttgtcactgtgcctagcagcagcctgggtaccaaaacttatacctgcaacgtggaccataaaccatctaacacaaaagttgacaaaagagttgagtcaaagtatggtcctccatgtcccccttgtcccgctcctgaattcttgggcggcccttcagtgttcctgtttccccctaagccaaaggacaccttgatgatttcaaggactcctgaggtgacctgcgtggtggttgacgtgagtcaggaggaccccgaagtgcagtttaattggtatgtagatggagtggaagtgcacaatgctaaaaccaaacctcgggaggaacaattcaattccacgtatcgcgtggtgagcgtgctgactgtcctgcaccaagactggctcaacggcaaagagtacaaatgcaaggtaagcaacaaagggctgccatcaagcattgaaaaaactattagcaaagccaaaggtcagccaagagaaccacaggtatacactctgcccccgtctcaggaggagatgacgaagaatcaagtgtctctgacctgtttggtgaaaggtttctatcccagcgatatcgcagttgaatgggaaagcaacggccaaccagaaaataactacaaaactaccccgcctgtgctggattcagatgggagcttctttctgtattccagacttacggtggacaagtccaggtggcaggaaggcaacgtgttctcatgctccgtgatgcatgaggcgctgcataatcactatacacaaaaatccctgtcactgtcattgggagcaggtggaggaggctctggtggtggtggttcaggaggtggtggatccggaggaggaggttctggtgcccctctgaagattcaggcatattttaatgaaactgcagatctgccctgccagttcgccaactctcagaatcagtctttgtccgagttggtcgtgttctggcaagaccaggaaaatctggtgctcaatgaggtctatctggggaaggaaaagttcgacagcgtccattccaagtacatggggcggactagcttcgatagtgactcatggaccctcaggctccacaatctccagatcaaggacaagggactctatcagtgcattatccaccacaagaaaccaaccggaatgattcgcattcatcagatgaacagtgagctcagtgttctcgctaacttcagccagcccgagatcgtgcccatcagtaacatcacagagaatgtttacatcaatctgacttgtagctcaatacatgggtatccggaacccaagaagatgtctgtgctcctgagaactaaaaactcaacaatcgaatatgacggagtgatgcagaaatcccaggacaacgtgaccgagctctacgacgtttcaattagcctctccgtgtccttcccagacgtgaccagcaatatgacaatcttctgcatcttggagaccgacaaaactcgcctgctcagctccccctttagcattgagcttgaagacccgcagcctcctcctgaccatatccca

SEQ ID NO: 156 - DNA, 1737 bp, synthetic construct
  misc_feature 1..1737: note = sugemalimab heavy chain -CD86 IgV polynucleotide
  source 1..1737: mol_type = other DNA
gaagtacaattgctggaaagtggcggaggactggttcagcctggtggatcccttcgccttagctgtgcagcctctggatttaccttcagctcctacgctatgtcctgggttagacaggctcccggcaaaggtctcgaatgggttagcggaatctctggttcaggtggctttacatactatgcagacagtgtcaaaggcagatttaccatcagcagagataactccaagaacacactgtacctgcaaatgaatagcttgcgggcagaggacaccgctgtctattactgtgccaagccacccaggggatataactacggacccttcgattactggggacaggggactctcgtgactgtcagtagcgcgagcaccaagggaccatcagtgttcccgttggcgccatgtagtcgatccacctcagaatccacagccgccctcggctgtctggtgaaggattacttccctgaacctgtgaccgttagttggaattccggcgctttgacatctggcgtccacacttttcccgcggtactccagtctagcggcctgtattctctgagttccgtggttactgttcctagcagcagccttggaacaaagacctacacatgcaacgttgatcacaaaccaagtaacaccaaggtggataagcgcgtggaatccaaatacggcccaccttgtccaccatgtccagctcccgagttcctgggaggtccatccgtgtttctgtttccacccaagccgaaggacaccttgatgatcagcaggaccccagaagtgacctgtgtcgttgtggatgtgtctcaggaggatccggaagttcagtttaattggtacgtggacggggttgaggtccacaacgccaaaactaaaccccgcgaggagcagttcaattccacataccgggtggtgtccgtcctgaccgtgttgcaccaggactggctgaacggcaaggaatacaaatgcaaagtgagcaataagggcctcccgagcagtattgagaagaccattagtaaggccaaaggacagcctagagaaccccaagtgtacacattgccaccctcacaagaggagatgaccaagaaccaggtctccctcacatgtcttgtgaaagggttttatccctcagatatcgctgtggagtgggaatcaaatggacaacctgaaaacaattataagactacccctcctgttctggactccgacgggtcatttttcctttactcacgcctcaccgtcgataagtcaaggtggcaggagggcaacgtattttcctgcagcgtaatgcatgaagccctccacaaccattatacacagaagagcttgtctctgagtcttggagcaggaggaggaggtagtggcggtggtggatcagggggaggaggttcaggaggaggaggttccggggcaccacttaaaatccaggcctacttcaatgagaccgctgatctgccctgtcagttcgctaactcccagaatcagagtctgtctgaattggtcgttttttggcaggatcaagaaaatctcgtgttgaatgaagtgtaccttggcaaggagaaatttgatagcgtccacagtaagtatatgggtagaaccagcttcgactcagattcctggactttgaggctgcacaatctgcagatcaaggacaagggtctgtaccagtgcatcattcaccacaagaaacctacaggcatgataaggatccatcagatgaacagcgagctgtctgtgctt

SEQ ID NO: 157 - DNA, 1740 bp, synthetic construct
  misc_feature 1..1740: note = CD86 IgV-sugemalimab heavy chain polynucleotide
  source 1..1740: mol_type = other DNA
gcccccctgaaaattcaggcctatttcaatgagacagcagaccttccatgtcagtttgccaattctcagaatcagtctctctctgagttggtggtcttctggcaggaccaggaaaatcttgtgctgaatgaggtgtatctggggaaagagaagttcgactcagttcacagcaaatacatgggcaggacaagcttcgactctgatagttggacactcaggctgcacaacctccaaattaaggacaaagggttgtatcagtgtattattcatcacaaaaaaccaactggaatgatacgaatacatcaaatgaatagtgagctctccgtactggctggagggggtggctcagggggaggggggtctggaggaggaggctctggcggcggcggctctggcgaggtgcagctgctcgagagcggaggaggcttggtgcagccaggcggctctctgcggctctcatgcgctgcctcagggttcaccttttcaagttacgccatgagctgggtgcggcaggcaccaggaaagggactggagtgggtgtcaggcataagcgggtccggaggctttacctattatgctgattccgtgaagggccggttcacaatcagccgcgacaactctaagaatacgctgtacctgcagatgaattctctgagagcagaagacacagccgtctattattgcgctaagcctccgagaggctacaattatggcccgttcgattattggggccagggcaccctggtaaccgttagtagcgcaagcacaaagggcccatccgtcttcccacttgccccatgctctagatctacttccgaatccacggctgcactgggttgcctggttaaagactactttccggaacctgtgactgttagctggaacagtggcgccctgacctctggcgtacacacgttccccgccgtactgcagtcttccgggctgtattccctttccagcgttgtgactgtaccatcttccagcctcggcacaaagacttatacttgcaacgtggaccacaaaccctcaaacactaaagtcgataaacgggtggagtccaagtacggtcccccatgtcccccgtgtccagcacccgagttccttggcgggccttccgtttttctgttcccaccaaaaccgaaagataccctgatgatttcacgcacccccgaagtaacctgcgtggtggtggacgtatcccaggaggaccccgaggttcaatttaattggtacgtcgatggtgtggaggtgcacaacgcaaaaaccaagcctcgggaagaacagtttaactcaacttatagggtggtgtccgtcctcaccgtccttcaccaggactggctgaatggtaaggagtataaatgtaaggttagcaataagggcctcccctcatccattgagaagactatctccaaggcaaaagggcagcctagggaaccacaagtgtacactctgccaccttctcaggaagaaatgacaaaaaatcaggtgagcctgacatgcttggtgaaaggattttatccatctgatatcgccgttgaatgggagagcaatgggcagcccgagaacaattacaaaactacaccaccagtgctggactcagatgggtctttttttttgtactctcgcctgaccgtggacaagtctaggtggcaggaggggaatgttttttcttgtagtgtgatgcacgaggcccttcataaccattacacccagaaatcactttcactgtctctgggaaag

SEQ ID NO: 158 - DNA, 1038 bp, synthetic construct
  misc_feature 1..1038: note = CD86 IgV-sugemalimab light chain polynucleotide
  source 1..1038: mol_type = other DNA
gctccccttaaaatccaggcatattttaacgaaaccgcagatctgccatgtcaatttgctaacagtcagaatcagtccttgtcagagctcgttgtgttctggcaggatcaagaaaacctcgtcctgaacgaggtgtatttgggtaaggagaagttcgactctgtgcactctaagtacatggggcggacatcctttgacagtgatagctggacactccgcttgcacaacctgcaaatcaaagataaagggctctatcagtgcataattcaccacaaaaagccaacaggtatgatccgcattcaccagatgaattcagaactgagcgttctggctggtggcggaggatctggcggggggggctcaggcggcggaggatccgggggaggcggctcaggcagctacgtgctcacacagcctccatccgtaagtgtggctcccgggcagaccgcccgcatcacctgtgggggaaacaacattggaagcaagtctgtgcattggtaccagcagaagcccgggcaggcccccgtcctggtggtgtatgatgattcagaccgaccctcaggaatccccgagcgcttctccgggtctaatagcggcaacaccgccacactgacaatctcaagagtcgaggccggcgacgaggctgattactattgccaggtttgggactcatcttctgatcacgtcgtctttggaggcggtaccaaactgactgtcttggggcaaccaaaggctgcccctagtgttaccctgtttccgccttcctctgaggagctccaggcaaacaaagcaaccctggtttgcctgatcagtgacttctaccccggagctgtcaccgtcgcttggaaagcggacagcagtcccgtgaaggccggcgtggaaacaacgacacccagcaagcaatccaataacaagtatgccgcttcctcatacctttccctgaccccagagcagtggaaaagtcacagaagctacagctgccaagttacccatgaaggaagcaccgtcgagaaaactgtggctcctacggagtgctct

SEQ ID NO: 159 - DNA, 1035 bp, synthetic construct
  misc_feature 1..1035: note = sugemalimab light chain -CD86 IgV polynucleotide
  source 1..1035: mol_type = other DNA
tcatatgtgttgactcagccacctagtgtgtcagtcgctcccggacagactgcaagaatcacctgtggcgggaacaacatcggctcaaagagcgtgcattggtatcagcagaaacccggtcaggcccctgtgctggtcgtatatgacgactcagatcgccctagcggcatccccgagaggttttccggcagtaatagcggtaacaccgcaaccctgaccatctcaagggtcgaagccggcgatgaggcagactattattgccaggtctgggatagttccagcgatcatgttgtcttcggaggcggcacaaagttgacggtcctgggacaaccgaaagccgctccaagtgtgaccctgtttccacccagcagcgaggagcttcaggccaataaagccactctggtgtgtctgattagcgacttttaccctggcgctgtgaccgtggcgtggaaagcggacagctctcccgtgaaagccggcgtggagacaacaaccccgtctaaacagtctaacaataagtatgctgcctccagctatttgtcactgactccggaacaatggaagtcccatcgctcttatagctgtcaggtgactcacgagggaagtacagtggaaaagaccgtggctcctacagaatgttccggcggagggggatctggcggcggcggctccggcggagggggaagcggaggcggcggcagcggagctcccctgaagatacaggcctatttcaacgaaaccgccgacctcccttgccagtttgctaactcacaaaaccaaagcctgtctgaactggttgtcttctggcaagaccaggaaaacctggtactgaacgaggtgtatctggggaaggagaaatttgacagcgtacactccaagtatatgggcagaacatctttcgactcagatagttggacgctcagacttcacaatttgcagattaaggacaagggactctatcagtgcattatccatcataaaaaacctactgggatgattcgaattcaccagatgaatagcgagctgtctgtgctt

SEQ ID NO: 160 - DNA, 1353 bp, synthetic construct
  misc_feature 1..1353: note = LAG3 D1/D2-sugemalimab light chain polynucleotide
  source 1..1353: mol_type = other DNA
ggcgctcctgctcaactcccatgttcaccaacaattccattgcaggatctgtcccttctccggagagcaggggttacttggcagcatcagccagattcaggaccaccagctgcagcacctggacatccacttgctccaggtcctcaccctgcagctccatcatcttgggggcccagacctcggagatacacagtactttctgtaggaccaggagggctgcgatctggaagattgcccttgcagccaagagtccagctcgatgagaggggaagacagaggggcgatttctcactttggcttcgccctgcaagaagagcagatgccggggaatatagagctgcagtgcacctgagagatagagcactgtcatgtcggcttagactgcggctgggtcaggcctctatgactgcaagcccgcctggttccttgagagccagtgactgggtcatccttaactgtagtttctctagaccagatcggcccgcaagtgtccactggttccggaacagagggcagggacgagttcccgtgagggaaagccctcaccatcaccttgctgagagttttctgtttttgccgcaagttagccctatggacagcggcccatggggatgcattctgacctacagggatggcttcaatgtatctggtggaggtggaagcggaggaggagggagtggaggaggtggtagtggtggtggaggttcaggatcttatgtcttgacccagcctccttcagtgagcgtcgctccagggcagacagccagaattacctgcgggggcaataatattggctctaagagcgtccactggtatcagcagaaaccaggccaggcgcctgtgctggttgtatacgatgactctgatagaccctcaggaatccccgaaaggttcagtggatccaactccggcaacacagctaccttgactatctccagggtggaggctggcgatgaggcagactactattgccaggtctgggactctagctctgatcacgtggttttcggcggagggacaaaactgacagtgctgggacagccaaaggccgcaccctctgtgacactctttccaccctcaagcgaggagcttcaggccaacaaggcaaccctcgtctgtttgatcagtgatttttaccccggagctgtgacagttgcgtggaaggccgattctagtccggtgaaagctggtgtcgaaaccaccacgccctctaaacaatcaaataataagtatgctgcctccagctacttgagtctgacaccggaacagtggaagtcccatcgctcatactcatgtcaggtgacgcatgaaggatctacagtggagaaaactgtggctcctacagagtgttca

SEQ ID NO: 161 - DNA, 1353 bp, synthetic construct
  misc_feature 1..1353: note = sugemalimab light chain -LAG3 D1/D2 polynucleotide
  source 1..1353: mol_type = other DNA
agttatgtgcttactcaacctccttcagtttccgtcgcgcctggtcagactgcacgaatcacttgcgggggcaacaacattgggtctaaaagcgtccattggtatcaacagaaaccaggccaggccccagtgctcgtggtatacgacgatagcgacaggccaagcggaattccggaaagattttccggcagcaactctggaaacaccgccaccctgacaataagtcgcgtggaagcaggggacgaagcagattattattgccaggtgtgggacagttcctcagaccacgtggtttttgggggggggaccaaacttacggtgttgggccagcctaaggctgccccatctgtgactctctttcccccatcttccgaggagttgcaggccaacaaggccaccctggtctgcctgattagcgatttttatccaggcgccgtgactgtggcatggaaagccgactctagtcctgtgaaagctggcgtcgagacaaccacaccctctaaacaatcaaacaataagtatgccgcgtccagctacctgtcacttacacctgaacagtggaagtcccatcgctcatactcttgtcaggtgacacacgaggggtcaactgtggagaaaacagtagcccctactgaatgttctggaggaggaggttctggaggaggcggcagtggaggaggaggatcaggaggtggaggatcaggtggcgcacctgcacaactgccatgttcaccaacaattccattgcaggatctttctttgctgcggcgcgctggtgtaacctggcaacatcaaccagattcagggccaccagcagcagctcctggtcatcctcttgctccaggtcctcaccctgcagctccaagcagttggggaccaaggccacgcagatatacagtgctgtctgttggtccaggcggcctcagatcaggcagactcccattgcagcctcgggttcagttggatgagagagggagacagagaggggacttctctctgtggctgagacctgctaggagggccgatgcaggtgagtatagagctgccgtgcacctcagagatagggctctgagctgtaggcttcggctcaggctgggacaagctagcatgactgcaagtccccctggttctttgagggctagcgactgggtcatactgaactgtagttttagtcgccccgaccgaccagcaagtgttcactggttcaggaacaggggtcagggacgcgtgcctgtcagagagtccccacaccatcatctggccgagagcttcctttttctgccacaggtgagcccgatggattctggaccatggggatgtatcctcacttatagggatggtttcaacgtgtcc

SEQ ID NO: 162 - DNA, 2451 bp, synthetic construct
  misc_feature 1..2451: note = CD86 IgV-sugemalimab heavy chain -LAG3 D1/D2 polynucleotide
  source 1..2451: mol_type = other DNA
gcaccactcaagatacaggcctactttaacgagacagccgaccttccatgccagtttgctaactcccagaaccagtccctcagcgaactggtggttttctggcaggaccaggaaaatctggtgttgaatgaggtctatctggggaaggagaagtttgacagtgtgcatagcaagtatatgggacggaccagttttgatagcgattcatggactttgcgcctccataacctgcagatcaaagataagggtctgtatcagtgcataatacatcacaaaaagccaacaggtatgataagaatccatcaaatgaatagcgaacttagcgtattgggcggggggggtagcggtggaggcggctctgggggcggaggatctggcggcggcgggtctggcgaggtacaactgttggaaagtggcggaggcctggtgcagccaggggggtccctgcgactcagctgcgccgccagcggttttaccttcagttcttacgctatgtcatgggtgaggcaggcccctggcaagggtctggagtgggtatccggtatatccggcagtggtggtttcacatactatgcggattcagtgaaaggacgctttactatttcaagggataactccaagaatacactgtacctgcagatgaactctctgcgcgccgaagacacagccgtttattactgtgccaaaccccccagggggtacaactacgggcctttcgattactggggccagggaacacttgtcaccgtgagctcagctagcaccaagggtccctctgttttcccactggccccatgttctagatctacttcagagagcactgctgccctgggttgcctcgtgaaagactactttcccgaacccgttactgtatcatggaacagcggcgcccttacctcaggcgtgcacacgttccccgctgtgttgcaatcctctggactgtactctctcagttctgtggtcacggtaccttcttcaagcctgggaaccaagacatacacctgtaatgtcgaccataaaccttctaataccaaagtggacaaacgggtggagagcaagtacggtccaccatgccccccctgtcctgcccctgagttcctgggcggcccatccgtgttcctgttccccccaaagccaaaagatacactgatgatcagccggacacctgaagtcacatgtgttgtcgttgatgtgtctcaggaagatcccgaagtgcagtttaactggtacgtggacggcgtggaagtgcacaatgccaagaccaagccacgggaagaacagttcaactcaacctaccgcgtggtgtccgtcttgacagtgctgcatcaagactggctgaatgggaaagaatacaagtgtaaggtttctaacaaaggtcttccatctagtatcgagaaaaccatctcaaaagcaaaagggcaaccaagggagccccaagtctacaccctgcccccctctcaggaggagatgaccaagaaccaggtcagtttgacttgcctggtgaaaggcttttatccaagcgacatcgcagttgaatgggagtcaaatggccagcccgagaataactacaagactaccccgcctgtgctggattctgacgggtctttctttctgtacagccggctgacggtggataagagccgctggcaggaagggaacgtgttctcctgttcagttatgcacgaagctctgcataatcactacacccagaagtcccttagtctgagcctgggggccggtggcggggggggatctggggggggtggttccggcggcggcggctcaggagggggcggctccggaggcgctccagctcagctcccttgctccccaactattcccctgcaagacctgtctcttttgcgcagagccggcgtgacatggcagcaccagcctgatagcggcccgccagcagccgctcccggtcaccccctggctcccggcccgcatcccgccgcgccaagcagctggggtccgaggcctaggcggtacacagtgctgagcgttgggcccggtggcctgcggtctggccggttgcccctgcagcctcgcgtgcaactcgacgaaaggggcaggcaacgaggcgactttagtctttggctgcgcccagctcgaagggccgacgccggtgaatatcgcgccgccgtccacttgagagacagagccctttcctgtagactgcgcctgcgactggggcaggccagcatgacggccagcccgcctggaagcctgcgcgcctcagattgggttatactgaattgtagttttagtagacccgatagaccggcatccgtccattggttcagaaacaggggccaagggcgagtcccagtgagggagtccccgcaccatcatttggcggagagcttcctgttcctcccacaggtgtctcccatggacagcgggccatgggggtgcatcttgacctaccgagacgggttcaacgtgtca

SEQ ID NO: 163 - DNA, 2541 bp, synthetic construct
  misc_feature 1..2541: note = CD86-sugemalimab heavy chain -LAG3 IgD1 polynucleotide
  source 1..2541: mol_type = other DNA
gcacctttgaagatacaggcttacttcaacgagactgcagacctgccatgccagttcgccaacagccagaatcagagcctctcagaacttgtggtattttggcaggatcaggaaaacctggtcctgaacgaagtgtacctcgggaaagaaaaattcgatagcgtgcactcaaagtatatgggccggacttctttcgactctgactcatggaccctcaggctccacaacttgcagattaaggataaaggactgtaccaatgcattattcatcataaaaagcccacaggaatgatccgcatccaccagatgaactccgaactgtctgtactcgccaatttttcccagcctgagatcgtgcccatcagcaacataacggagaatgtgtacatcaatctgacttgttccagcatccacggatatcccgaacccaagaaaatgtccgtcctgctgagaacgaaaaatagcactatcgaatacgacggggtgatgcagaaaagccaggacaatgttactgaactgtatgacgtgagcatcagtcttagtgtttctttccctgatgtgacatcaaatatgaccattttttgcattctggagaccgacaagacaaggctcctgtcctcacctttttccattgagctggaggatccgcagccccccccggatcacatccccgccggggggggagggtcagggggcggaggaagcggcgggggggggagcgggggcgggggatcaggcgaagtgcagctgttggaatctggaggtggacttgtgcagcccgggggttcattgcggctgtcctgcgcagcgagtggtttcaccttcagctcttacgcgatgtcttgggtacggcaggcacccgggaagggccttgagtgggtgtcagggatatcaggttcaggcggctttacatactacgctgactccgttaagggacgctttacaatcagcagagacaattccaagaatacactgtacttgcaaatgaacagcctgcgggcggaggacaccgctgtgtattattgcgccaagcccccaagagggtacaattacggccctttcgactactggggtcagggcaccctggtgacagtctccagcgcctccaccaagggcccaagtgtgttccctctggccccatgttcacgaagtaccagtgaaagtactgcagcattgggatgcctcgttaaggactactttcctgagcctgtgacggtgagctggaatagtggggccctgactagtggcgttcatacattccccgctgtgcttcaaagctccggactgtactctctgtcctccgtcgtcaccgttcctagcagttccctggggaccaagacctacacctgtaacgtggaccacaaaccaagtaacacaaaggtggacaagagagtcgagagcaagtacgggcccccatgtcccccgtgtcccgcccccgagtttctggggggaccatccgtgttcctgttcccgccaaaacccaaggatacccttatgataagccggacgcctgaagtgacttgcgtcgtggtcgacgtgtcacaggaggaccccgaagtgcagtttaattggtacgtggatggcgtcgaggtccacaacgccaagactaaaccccgcgaagaacagttcaattccacgtaccgggtcgtgtccgtccttaccgtgctccatcaggactggctgaatgggaaagagtacaaatgtaaggtgagtaacaaaggcctgccctccagtatagagaaaactatttctaaggccaaaggacagccccgggaacctcaggtgtatacgttgcccccttcccaggaggagatgaccaagaaccaggttagcctcacctgcctggtaaaaggcttttaccccagtgacatcgccgttgagtgggagagtaacggacaaccagagaacaactataagacgacacctcctgtgcttgacagtgacggttccttcttcctgtacagccggttgaccgttgacaagtctaggtggcaggagggaaatgttttctcatgtagtgtgatgcacgaagccctccacaatcattatacccagaagtccctgtccctgagcctgggggccggcggaggaggtggcagcggaggcggtgggtcaggcggcgggggcagcgggggcggtgggtccggtggcgcccccgcacagctgccctgctccccaaccatccccctgcaggacctcagccttcttcgcagagccggcgtgacatggcagcatcagcccgacagtggacctcccgcggctgctcctggacatcctttggctccaggccctcaccccgcagcaccatccagctggggcccacgcccacggcggtacaccgtgcttagcgtcggtcccggaggcctccggagtgggcgccttccgctgcagcctcgcgtccaattggacgaacggggtaggcagagaggggacttctcactgtggctgcggcctgccaggagagctgacgccggagaatatagggcagccgtgcacctgagagacagagcccttagttgtcgactcaggcttaggctcgga

SEQ ID NO: 164 - DNA, 2196 bp, synthetic construct
  misc_feature 1..2196: note = CD86 IgV-sugemalimab heavy chain -LAG3 IgD1 polynucleotide
  source 1..2196: mol_type = other DNA
gcccctctgaagatacaagcgtactttaatgagacagccgacctcccatgtcaattcgccaactcccagaaccagtccctgtcagaactggttgtcttctggcaggaccaagaaaacttggtgctgaatgaggtctatttgggtaaggaaaagttcgattccgtgcactccaaatacatgggcagaactagctttgactccgattcctggaccctccgcctgcacaatctgcaaattaaagataagggcctgtatcaatgtatcatccaccacaagaaacccacaggaatgattaggatccaccaaatgaactctgagcttagcgtcctgggaggcgggggttccgggggcggcgggtccgggggggggggctccggggggggcgggagcggcgaggtgcagctgctggaatctgggggaggtctggtacaaccgggcggcagcttgcggctgtcatgtgccgcctctggatttacatttagcagttacgccatgagctgggtgaggcaggctcctggtaagggactggagtgggtcagcgggattagcgggtctggcgggttcacttactacgccgactccgtgaaagggcggttcacaatttctagagacaattctaagaacaccctgtatctgcagatgaactctctgcgggcggaagacacggcagtgtactattgcgccaagcctccgagaggctacaattatggtccgtttgattactggggacaagggaccctcgtgaccgtgtcaagcgcctcaaccaagggacctagtgtgttccctttggccccctgctcaagatccacttctgagtccactgccgcccttggatgtctggttaaggactacttccccgagcctgttaccgtatcttggaatagcggtgccctgactagtggcgtacacacatttcccgcagtcctgcagtcttctggcctttattccctttcttccgtggttacggtaccctccagctctttgggcacaaagacctacacatgcaatgtcgaccataagcctagcaacacaaaagtggacaagagagttgagtccaaatacgggcccccatgccccccatgcccagcccccgagtttcttggcgggcctagcgtatttcttttcccacccaaacctaaggacacacttatgatatccagaaccccagaagtgacttgtgtggtggtggacgtgtctcaggaggatcccgaggtgcagtttaattggtatgtggatggtgttgaggtgcacaacgccaagacaaagcctcgggaagaacagttcaatagtacatatcgagtggtttcagtgctgactgtgctgcaccaggattggcttaatgggaaagaatataagtgcaaggtgagcaacaagggcctgcccagttcaattgagaagactatctccaaagctaaaggacagcccagagaaccacaggtgtacactttgcccccttcccaggaagagatgacgaaaaaccaggtgtctctcacgtgcctcgtgaaaggattttacccttcagatatagccgtagaatgggaaagcaatggtcaacctgagaacaactataagaccactcctccagtcctggatagtgatggctccttttttttgtactccagactgaccgtggacaagtccagatggcaagaggggaatgtcttttcctgtagcgtgatgcacgaagcactgcacaatcactacactcagaaatcactgtcactttcccttggggccggtggagggggcggaagtggtggcggcggctccggcggcgggggttccggcggagggggcagtggtggggcccccgcacagcttccttgttcacctacaatccccctgcaggatttgtcattgctgaggagagctggagtgacatggcagcaccagccagatagcgggcctccggccgccgcacccggacaccccttggcccctggtccacacccggcagcgccttccagctggggtccacggccccgaaggtataccgtgctgtcagttggccccggcggtttgcgaagtggcagattgccactgcaaccccgggtgcagctcgacgaacggggaaggcaaaggggcgatttctccctgtggcttcggcctgcccgaagagccgatgcgggagagtatcgcgctgccgtccatctcagagatagagccctctcatgtaggctgcggttgcgactgggc

SEQ ID NO: 165 - DNA, 3087 bp, synthetic construct
  misc_feature 1..3087: note = CD86 IgV-sugemalimab heavy chain -LAG3 polynucleotide
  source 1..3087: mol_type = other DNA
gctcctctgaagatacaggcatacttcaacgagacggccgacttgccctgtcagttcgctaactcccagaaccagagcctgtccgaactcgtcgtgttctggcaagatcaagaaaacttggtgcttaatgaagtgtacctgggtaaagagaagtttgattccgtgcattccaagtacatgggcagaacatccttcgatagtgactcttggacgctgcgactgcacaacctccagattaaggataaaggtctttaccagtgtatcattcaccacaaaaagcctacaggtatgattagaatccatcagatgaactccgaactttctgtgctcggcggcggaggaagcggaggcggagggtccggcggaggcgggtctggtggagggggatcaggggaggtccagctcctggaatccgggggcgggttggtgcagccagggggtagcctcagactgagctgcgctgcatctggattcacgttctccagctatgcaatgtcctgggttagacaagcccccggaaaagggctggaatgggttagtggcatctccggctctgggggcttcacctattatgcagattcagttaaaggccgcttcacaatttccagggacaattctaagaataccctttatctccagatgaactcactgcgcgcggaggacacagctgtgtattactgcgccaagccgcctcgggggtacaactacggaccgttcgattactggggccaaggaacccttgtcactgtctcttccgccagcaccaaaggtccatctgtatttccactggcaccatgcagccgatcaactagcgaatctaccgccgcgctggggtgtctggtgaaggattatttccccgagccagtcactgtgagctggaattcaggtgccctgacttctggggttcacacgtttccagccgtgctccagtcctccggactgtactccctttcctctgtcgtgactgtgccctccagctctttgggaactaagacttatacatgcaatgtcgatcacaagccctccaatactaaggtggataagcgagtggagagtaaatacggccctccctgtcctccttgccccgccccggaatttctgggcggccctagtgtcttcttgtttccgcccaaacctaaagatacacttatgatatccagaacacccgaggtcacatgcgtggtcgttgatgtgtcacaagaagaccctgaagtgcagttcaactggtatgttgatggcgtagaagtacataacgctaaaactaaaccgagagaggagcagtttaattctacctacagggtcgtgtcagtgctgactgtcctgcatcaggattggctgaacgggaaagaatacaaatgcaaggtgtctaataaaggcttgcccagttccattgagaaaaccattagtaaggctaaggggcagccccgcgagcctcaagtatatacactcccaccatctcaggaagagatgacaaaaaaccaggtcagcctgacatgcctggttaaggggttctacccaagcgacatcgcagtggaatgggagagcaacggccagccagagaataattacaaaacgacccctcccgtgctcgacagtgatggcagttttttcctgtacagcagactgactgtggacaagtcccgatggcaggaaggcaacgttttctcctgctccgtcatgcacgaggccctccataaccattacacccaaaaatcactgagtctgagtctcggcgctggcggtggaggaggttctggcggtggcgggtccggcgggggaggcagtggaggcggaggaagtggactgcagcccggcgcagaagtgcctgtcgtgtgggctcaagagggcgctcccgctcagctgccttgttctccgacaattccactgcaggacctgtctttgttgaggcgggctggagttacctggcagcaccagcccgactccggtcctcccgccgctgctccaggacaccctctcgcacctggtccccatcctgccgccccaagttcttggggccctagaccacgccgctacacggtgctgtccgtcggccccggcggcctgaggagcggaaggctgcctctgcagcccagagtgcagctggacgagaggggaaggcagcgcggcgatttcagtctctggctgagaccagcaagaagagccgacgccggtgaatacagggctgccgttcatttgcgggaccgcgccttgtcatgccggctgcgccttcgattggggcaggcatccatgacagcctccccccccggttcactccgagcctccgattgggtgattctcaactgctcattctcaaggcccgaccggcctgcttctgttcattggtttagaaatcgcggccagggccgagttcctgtgcgggagtcaccccaccatcacctcgctgaatcattcctgtttcttcctcaggtcagccccatggacagcggcccctggggatgtattttgacctacagggacgggtttaatgtgtctatcatgtacaacttgactgttctgggactcgagccacccaccccgttgaccgtatacgccggggcaggttcccgagtgggtcttccgtgcagactcccagcaggcgtcggaacgaggtctttcctcactgcaaagtggacccctcctggcggtggaccagacctgctggtgacaggcgataacggagacttcactctcaggctcgaagatgtctcacaggcccaggcagggacctacacttgccatatccatttgcaggagcagcaacttaacgcaactgtgaccttggccatcatcactgtcacacccaaatccttcggaagccctggcagcctggggaagctgctgtgcgaagttactccagtttctgggcaggagcggtttgtgtggagttcactggacacaccctcacagcgcagtttctcagggccctggctggaggcccaggaagcacagctgctgagtcaaccttggcagtgccagctgtaccagggtgaacgcttgttgggcgccgcagtgtattttaccgagctgagcagtcctggcgctcagaggagcgggcgggctccaggcgcacttcctgctggtcacctt

SEQ ID NO: 166 - DNA, 3432 bp, synthetic construct
  misc_feature 1..3432: note = CD86-sugemalimab heavy chain -LAG3 polynucleotide
  source 1..3432: mol_type = other DNA
gctcctttgaagattcaggcttactttaacgaaaccgccgatcttccttgtcagtttgctaattcccagaaccaatccctgagtgagctcgtagtattttggcaggatcaggagaacctggtattgaatgaggtctacctgggaaaagaaaaattcgactctgtgcactctaagtatatgggtcgcacttcatttgactccgatagctggacactcaggttgcataacctgcaaataaaagataaagggttgtatcagtgtatcattcatcataaaaagccaacggggatgatccggatccatcaaatgaactccgagctgtcagtgctggctaatttttctcagcctgagatcgtgccaatatccaatatcactgaaaacgtgtacattaaccttacttgtagttccattcacggctaccccgagccaaagaaaatgagcgtgctgctgagaacaaaaaattcaaccattgaatacgacggagtgatgcagaagagccaggacaatgtgactgagctctatgatgtgagcatatcacttagcgtatcttttccggatgtcacgtccaacatgactatcttctgcatactggaaactgacaaaacccggctgctgtcctcccctttttctattgagctggaggatccgcagccccccccagaccacatccccgctggtggcgggggctccggggggggaggaagtggaggcggcgggagtggcggaggtgggagcggtgaggtgcaactgctcgaaagcggggggggactcgtacaaccagggggatcactgcgcctttcctgcgccgcatccgggttcacgttttcatcatacgctatgtcatgggtgcgacaggctcccggcaaggggctggagtgggtcagtggcatctcaggttccggcggattcacctactacgctgattcagtgaaaggaagattcactatcagccgggataacagcaagaatactctgtacctgcagatgaactctctcagggccgaggacacagcagtgtactactgcgccaagccaccaagaggctacaattacggccctttcgactactgggggcagggcaccctggtgactgtctccagtgctagcactaaggggccctccgtgtttcccttggccccttgcagccgctccacatctgaaagtaccgccgccctcgggtgtttggtgaaggattatttccccgagcccgtcaccgtgtcctggaactctggggctctcacttctggagttcataccttccctgctgtgcttcaaagcagcggcctctactctctttcttccgtggtgactgtgccgtcttcttctctgggcacaaaaacttatacatgcaacgtggatcataaacccagcaacaccaaggtagataaaagggtggagagcaaatatggtccaccctgccctccttgtccagctcccgagttcctgggcggacccagtgtctttttgttcccccctaagcccaaggacaccctgatgatctcccgaacacctgaggtgacttgtgtcgtcgtcgacgtgagtcaagaagatccagaggtccagtttaactggtatgtggacggcgtcgaggttcacaacgccaagactaaaccccgggaagaacaattcaactccacataccgggtggtctctgttcttaccgtcctgcatcaagattggctgaatggtaaggaatacaagtgtaaagtctcaaacaaggggctgccatcttcaattgagaaaacaatcagtaaagctaaaggccagcccagagaacctcaagtgtacaccctgcctccttcccaagaagagatgactaagaatcaggtgagtctcacctgcctggttaagggattttatccaagcgatatcgccgtggaatgggagtccaatggacagcctgagaacaactataagaccacccctccagtgttggattcagatggctcattcttcctgtactctagactgaccgtggacaaatccagatggcaggaagggaacgtgtttagttgcagcgtgatgcacgaagccctgcacaaccactatactcaaaagtcactcagcttgagcttgggagccggtggggggggaggttctggtggagggggatctggcggcggagggtccggcgggggaggaagtgggttgcagccaggggctgaagttcctgtggtgtgggcccaagagggagcaccggctcagttgccttgttcccctacaatccctttgcaggacctctcactcctgcggagggcaggtgtgacatggcagcaccagcccgactctggccctccagctgcggcccccggtcatccactggctcctggacctcatcccgctgcccctagctcttgggggcctcgaccgagaagatataccgtcctgtccgtgggtccaggaggtctccggtccgggagattgccgctccagcctcgcgttcagctcgatgaaagaggcagacagcgcggagatttctcactgtggctgaggccagcacgccgggcagatgcgggagaatatcgagcagcagtgcatttgcgagacagagcccttagttgtcggctgcggctgagactggggcaggccagcatgacagcctcccctcctggctctctgcgcgcctctgactgggtgatactgaattgctccttcagccgacccgaccggcccgcctccgtccactggttccgcaacagagggcagggaagggtgcccgttagagagtctccccatcatcacctggcagaaagcttcctgttcctcccccaggtgagtcctatggactcaggcccatgggggtgtatccttacatacagggacggcttcaacgtgagtatcatgtataatctgactgttcttggtctggaacctccaaccccgctcactgtttatgctggggccgggagccgggtgggacttccatgcaggctgccggccggggtcggcaccagaagctttttgaccgccaaatggactcctccaggtggtggcccagacctgctcgtgacgggagataatggagactttacactccggcttgaagatgtgtcccaagcacaggctggcacctatacttgtcacattcatctgcaggaacagcaactgaacgctacagttaccctggccataatcaccgtcacccccaagagcttcggatccccaggctccttggggaagctgctctgtgaggtgacccccgtgtctggccaggagaggtttgtatggtcatccctggatactccttcccagcggtcattttctggcccctggcttgaggctcaagaggcacagctgttgtcccagccatggcagtgtcagttgtaccagggagaaagactcctgggtgccgccgtgtacttcactgaactgtcctcccccggggctcagcggtctggaagggcccctggtgcactgccagcagggcatctg

SEQ ID NO: 167 - DNA, 3435 bp, synthetic construct
  misc_feature 1..3435: note = LAG3-sugemalimab heavy chain -CD86 polynucleotide
  source 1..3435: mol_type = other DNA
ttgcaacctggtgcagaagtacctgttgtatgggctcaggaaggagcccctgcccaattgccttgctcaccaactattccacttcaggacctgtctttgcttcgaagggctggcgttacttggcagcatcagcctgattccggtcctcctgctgctgcacctggacaccctcttgcacctggaccccatccagcagctccttctagctggggcccaaggccaaggcgatacacagtccttagtgtcggtccagggggacttaggtctggaaggctgccactgcagcctagagttcagttggacgagcgcggcagacagagaggagattttagtctgtggctgcgcccagcaagaagagcagacgctggggaatacagggctgccgttcatcttcgcgacagggcattgagttgtcgcctgaggcttcgcctgggacaggcatcaatgaccgcctcccctcctggatctctgagggcttctgactgggtcatcttgaactgcagtttctcccgaccagatagaccagctagcgtgcactggttccgcaacagggggcagggtagagttcccgttagagaaagccctcaccatcacctcgccgagagctttttgtttctgccccaggtatctccgatggactccggaccatggggctgcattctgacttatagagacgggtttaacgtgtcaatcatgtacaatctcactgttctgggactggaaccaccaacgccgctcacagtttatgcaggggctggatcaagagttggacttccctgcagactgcccgctggtgttggtacaaggagcttcctgactgccaaatggacaccacctgggggaggaccagatctgcttgtgaccggtgataatggtgacttcaccctgcggctcgaggatgtgagtcaagcccaggctggaacctacacctgccacattcatctgcaggagcaacagctcaacgctaccgttaccctcgccattatcactgtcacccccaagtcctttggttcacctggcagtcttggcaaactgctgtgcgaggtcacacccgtgtcaggacaggaacggtttgtatggagcagccttgacactccttctcaacgcagcttctcaggcccatggcttgaagcacaggaggcacagctcctgtcccaaccctggcaatgtcagttgtaccaaggggagagactcctgggtgccgctgtgtatttcaccgagttgtctagtcccggcgcacaaagatccggacgagcacctggagctttgccagcaggtcatcttggtggtggaggaggatctggcggtggaggatctggtggaggaggatcaggtggtggtggctctggagaggtgcagctgctggagagtggaggaggccttgtgcaacctggtgggagcttgaggctgagttgtgccgcttccggctttaccttctctagttacgctatgtcttgggtgagacaggcaccaggcaaaggcctggagtgggtgtccggaatcagcggatccggaggatttacttactatgccgacagtgttaagggccgattcacaattagccgcgacaactccaagaacaccttgtacctgcagatgaacagtctgagagccgaagataccgcagtgtattattgcgcaaaacccccaaggggctacaactacgggccttttgattactgggggcagggaactctggtgacggtgtcatcagcaagcacgaagggtccttctgtgtttccattggctccgtgctcaaggtccacgtcagaaagcaccgccgcactgggttgtctcgtcaaagattatttccccgaaccggtcaccgtttcatggaacagtggagcgttgacctccggcgtgcacacctttccagccgttctgcagtcttccgggctctacagcctgtcctctgttgtaactgtgccatcaagctcactgggcaccaagacttacacatgtaacgtcgaccacaagccctctaacactaaggtggacaaacgggtggaaagcaaatatgggcctccatgtccaccatgtcccgctcctgagtttcttggcgggccttcagtgttccttttcccacccaagcccaaagacacacttatgatctcccgcacgcctgaagtgacatgcgtggtggtggatgtctctcaggaagacccggaggtgcagttcaactggtacgtcgacggcgttgaagtacataacgcaaaaactaagcctagggaggagcagtttaattcaacttaccgcgtcgtgagcgtactcacagtgctgcaccaagactggcttaatggcaaggagtataagtgcaaagtaagtaataaagggctccccagctctatcgagaagaccatctccaaagcgaaagggcaacccagagagcctcaggtgtacacactgccaccaagccaggaggagatgactaaaaatcaggtgagcctgacgtgcctggttaagggcttttaccccagtgacatcgccgtagaatgggagtcaaatggacaaccagagaataattacaagacgacacctccggtgctggactcagatgggtccttttttctgtattccaggcttacagtcgataagtcccgatggcaagagggcaacgtgttctcctgcagcgtgatgcacgaggccctgcacaaccactatacccagaaatccctgtccctttcccttggagccggaggaggaggaggttctggaggaggtggatcaggaggtggaggatcaggcggcggtggatcaggtgctcctctgaagatacaggcgtacttcaatgaaactgcggacctgccctgtcagtttgcaaattctcagaatcagagcttgagtgaacttgtggtcttttggcaagaccaggagaatttggtgctgaacgaggtctacctgggcaaagagaaattcgatagcgtgcattcaaagtacatgggcaggacttcatttgattcagattcttggaccttgcgcctgcataatttgcagattaaggataagggcctgtaccagtgtatcatacatcacaagaagccgaccggcatgatacgaatacaccagatgaacagtgagctcagcgttctggctaattttagccagccagagattgtccccattagcaacatcacagaaaacgtctacattaacctcacctgtagtagcatccatgggtacccggaaccaaagaagatgtcagtcctgctgagaactaagaatagtacaatcgagtacgacggcgtgatgcagaagagtcaggacaacgtcaccgaactgtacgacgtttcaatctctcttagcgtgtctttcccagacgtgaccagcaatatgactatcttctgcattctggaaacagataaaactcgactgctgagctccccattctctatcgaactcgaagacccccagccaccacccgatcatattcctgca

SEQ ID NO: 168 - DNA, 3084 bp, synthetic construct
  misc_feature 1..3084: note = LAG3-sugemalimab heavy chain -CD86 IgV polynucleotide
  source 1..3084: mol_type = other DNA
ttgcaaccaggagctgaagtccctgttgtttgggcccaagaaggtgccccagctcagctgccttgcagtcctaccattcctctgcaagatctgtccttgctgagaagggctggagtgacgtggcagcatcagcccgattcagggccaccagcagcagcaccaggacatcctcttgctccaggacctcaccctgccgcaccttcttcttggggccctagaccccgcagatacaccgttctgtctgtggggcctgggggactgagaagcggaagacttcccctgcaaccaagagtccaactggacgagcgaggcagacaaagaggcgatttttctttgtggctgagacccgctcggagagccgatgctggtgaatacagagccgcagttcatctgcgagacagagcactgagctgccgcttgcgacttagacttgggcaggcatccatgactgcttccccaccaggctccctgagagcttcagactgggtaatcctcaactgctctttctcccgcccagacaggccagcctctgtacattggttcagaaatagaggtcagggacgcgtcccagttagggaatccccccaccatcacctggctgagtccttcctgtttcttcctcaggtgagtccaatggactctgggccatggggatgtattctgacgtatagggacggctttaacgtgagcataatgtataatctgactgtcctcggccttgagcccccaactccgcttaccgtgtatgctggagcagggagtagagtcgggctgccatgtagattgcccgccggagtggggactcggtcttttctcacagcaaagtggacacctccaggtggaggtcctgaccttctggttaccggagacaacggagactttacactgcggctcgaagatgtgagtcaggcccaagccggtacctatacttgccacatccacctgcaggagcagcagctgaacgcgactgtgacactggctatcataacagtaacccctaaatctttcggaagtcctgggtccctcgggaaactgctgtgcgaggttactcctgtttccggacaggagcggttcgtgtggtcctctctggacacaccatcccagagatccttctctggaccttggctggaggcccaagaggctcagctgctctctcagccgtggcagtgtcaactttatcagggggaaagactgttgggggctgctgtgtatttcacagaactgagttcaccaggagctcagagatctgggagggctccaggagcattgcctgcaggtcacttgggaggaggaggaggaagtggaggaggaggcagtggaggaggtggaagtggtggcggtgggagtggagaagtgcagctcctggagtctggaggaggattggtacagcccggtggctcactgaggctttcatgcgccgcttccggattcacgttttccagctatgccatgtcatgggttaggcaagccccgggcaaagggcttgaatgggtgtcaggaataagcggcagcgggggatttacgtattatgccgattccgtgaaggggagattcacaatctctcgcgacaacagcaagaacaccttgtacctgcagatgaattcactgcgagccgaggacacggccgtgtactattgtgctaaaccaccccgcggttataactatggccccttcgactattggggacaaggaacactggttaccgtatccagcgcaagtacaaagggaccatccgttttcccactggcaccgtgctctcgctctaccagcgagtctacggctgccttgggctgtctggtaaaggattattttccagagccagtgacagtgagctggaactccggagccctgacaagcggcgtgcatacctttcctgctgtcctccagagctcagggttgtattctctgagttccgtagtcactgtgccgagttctagcctggggaccaagacctatacatgcaatgtagatcataagcctagcaatactaaggtggataaacgagtcgaatctaagtatggtccaccttgtcctccatgcccagcaccggaattcctgggaggaccctctgtcttcctgttcccccccaagcccaaagataccctgatgatctcaaggactccagaagtgacttgtgtggttgtcgacgtcagccaggaggatcccgaggtgcagtttaattggtacgtcgacggggtcgaggtccacaatgccaaaaccaaaccacgcgaggagcagtttaatagcacgtacagagtggtctctgtgctcacggtcctgcatcaggactggctcaacggaaaggaatacaaatgcaaggtgtccaataagggtctgccctcctctatcgagaagacaattagcaaggcgaaaggacagcccagggagccccaagtgtacactcttcccccaagccaggaggaaatgactaagaatcaagtatctttgacatgcctcgtgaaagggttctatccaagcgacatcgccgtcgagtgggaatcaaacggacagccagaaaataattacaagactacaccccccgtgttggactcagacggtagcttcttcctgtacagtcgcctcactgtcgataagagccgatggcaggagggcaatgtgttttcctgcagtgtaatgcacgaagcactccacaaccactacacccagaagtctctgtctctttctctcggagctggtggaggcggaggttcaggaggtggaggatcaggaggaggaggttcaggcggtggtggagctccactgaaaatccaggcatactttaatgaaaccgccgatctgccttgccagttcgctaactcccagaatcagtctctcagtgagctggtcgtattctggcaggatcaggagaacctcgtgctcaatgaagtgtacctcggaaaggagaaattcgacagcgttcattcaaagtatatggggcggacatctttcgattctgattcctggacactccgcctccacaacctgcaaattaaagacaaaggactttatcagtgcatcatccaccataaaaagcctaccggaatgattcggattcaccagatgaacagcgagctctccgtgctc

SEQ ID NO: 169 - DNA, 1080 bp, synthetic construct
  misc_feature 1..1080: note = Envafolimab (KN035 ) polynucleotide
  source 1..1080: mol_type = other DNA
caggtgcaattggtagaatcaggtggcggactcgttcaaccaggaggcagtcttcgcctgtcttgtgctgcatccggaaaaatgtcttctcggcgatgtatggcttggtttaggcaggctcccgggaaagagagggaaagagtggcaaagttgctgaccacctctgggtctacatatctggccgatagcgtcaaaggcaggtttaccatcagccgagacaacagcaagaatacagtttatctccaaatgaacagcctgcgggcagaggatacagctgtctactactgtgccgccgactcctttgaagaccccacttgcactcttgtcacctccagcggcgcatttcagtattggggccagggtacgctggtgactgtttcctctgagcccaaatccagtgataagacccacacctgtcctccatgtccggcaccagaactcctgggaggtccatccgtgttcctgtttccccctaagcccaaggatacgctgatgataagcagaactcccgaagtgacatgtgtggtggtagcagtatcccatgaggaccccgaagtcaagtttaattggtacgtggacggcgtggaggtgcacaatgccaagacaaagccacgggaggagcagtataactcaacctatcgagtcgtaagcgtcctgacagttttgcaccaggattggctgaatggcaaggaatataaatgtaaggtcagtaataaggcccttccagcaggaattgagaagactatctccaaggctaaggggcaaccaagagagccccaagtgtacaccctgccaccaagcagagacgaactcacaaagaatcaagtatccttgacatgccttgtgaagggattctacccctccgacatcgccgtggaatgggagtccaacggacagcccgaaaataactacaaaacaactcctccagtgctggacagtgatggctcttttttcctgtatagcaaattgaccgtggacaagtcacgatggcagcaaggcaacgtgttctcctgtagcgtgatgcacgaagcgctccataatcactacactcagaagagcctgagtctcagccctggtaag

SEQ ID NO: 170 - DNA, 1476 bp, synthetic construct
  misc_feature 1..1476: note = CD86 IgV-Envafolimab polynucleotide
  source 1..1476: mol_type = other DNA
gccccactcaagatccaggcatatttcaatgaaactgctgatttgccctgccagttcgctaacagtcagaatcagtctttgtctgagctggtggtgttttggcaggatcaagagaacctggtgctgaacgaagtatacctcgggaaagaaaaatttgactccgtccactctaaatacatgggccgcacaagcttcgattctgatagctggaccctgcgcctccataacctgcagatcaaggacaagggtctgtatcaatgcatcattcaccacaaaaaacccaccggcatgatccggatacatcagatgaatagcgagctgagcgttctcgctggaggcggaggctctggtggggggggcagtggtggcgggggaagcggaggcggcggctccggacaagtgcagctggtagagtccggcggcggtctcgtgcagcctgggggctctttgagactgagttgcgccgccagcggcaagatgtctagccgcaggtgtatggcatggttcagacaggcccccggaaaggagagggagagggttgctaagttgttgacaacatcagggagcacttacctggccgattcagtcaaggggaggtttacgatttctcgcgataactcaaagaatactgtttaccttcaaatgaactcacttcgcgccgaagacaccgccgtgtattactgcgcagccgacagctttgaggatcccacctgtactttggtgacgagttctggcgcctttcaatactggggacaggggactctggttaccgtatcttctgaaccgaagagttctgataaaacacacacctgccccccctgccccgccccagagctgctgggggggcctagcgtgttcttgttccccccaaagcccaaggacaccctgatgattagtaggacaccagaggttacctgtgttgttgtcgccgtgtctcacgaggatccagaggtcaagttcaattggtacgtcgatggcgtggaagtgcacaatgcaaaaaccaagccgcgcgaagagcagtacaattccacatatagggtagttagcgtattgacagtgttgcatcaggactggctgaacggcaaggagtacaagtgtaaggtcagcaacaaagccctcccggctggaatcgaaaaaaccatctcaaaagctaaggggcagcctagggaacctcaggtgtatactctccctccatcacgggacgaactgactaagaaccaggtttcattgacctgtctggtcaaaggattctaccctagtgacatcgctgtggaatgggagtccaatggccagcctgagaataactacaagacgacccctcctgtcttggacagcgatggctctttttttctttacagtaagctgacggtcgacaaaagtaggtggcagcagggcaacgtcttctcatgctctgtcatgcacgaggctctccacaaccattacacacaaaaatcactgagtctgagtcccgggaaa

SEQ ID NO: 171 - protein, 729 aa, synthetic construct
  REGION 1..729: note = CD86 IgV-LAG3 D1/D2-Envafolimab
APLKIQAYFNETADLPCQFANSQNQSLSELVVFWQDQENLVLNEVYLGKEKFDSVHSKYMGRTSFDSDSWTLRLHNLQIKDKGLYQCIIHHKKPTGMIRIHQMNSELSVLGGGGSGGGGSGGGGSGGGGSGGAPAQLPCSPTIPLQDLSLLRRAGVTWQHQPDSGPPAAAPGHPLAPGPHPAAPSSWGPRPRRYTVLSVGPGGLRSGRLPLQPRVQLDERGRQRGDFSLWLRPARRADAGEYRAAVHLRDRALSCRLRLRLGQASMTASPPGSLRASDWVILNCSFSRPDRPASVHWFRNRGQGRVPVRESPHHHLAESFLFLPQVSPMDSGPWGCILTYRDGFNVSGGGGGSGGGGSGGGGSGGGGSGQVQLVESGGGLVQPGGSLRLSCAASGKMSSRRCMAWFRQAPGKERERVAKLLTTSGSTYLADSVKGRFTISRDNSKNTVYLQMNSLRAEDTAVYYCAADSFEDPTCTLVTSSGAFQYWGQGTLVTVSSEPKSSDKTHTCPPCPAPELLGGPSVFLFPPKPKDTLMISRTPEVTCVVVAVSHEDPEVKFNWYVDGVEVHNAKTKPREEQYNSTYRVVSVLTVLHQDWLNGKEYKCKVSNKALPAGIEKTISKAKGQPREPQVYTLPPSRDELTKNQVSLTCLVKGFYPSDIAVEWESNGQPENNYKTTPPVLDSDGSFFLYSKLTVDKSRWQQGNVFSCSVMHEALHNHYTQKSLSLSPGK

SEQ ID NO: 172 - DNA, 2187 bp, synthetic construct
  misc_feature 1..2187: note = CD86 IgV-LAG3 D1/D2-Envafolimab polynucleotide
  source 1..2187: mol_type = other DNA
gcccctttgaaaattcaggcatatttcaacgagaccgccgatctgccctgtcagtttgccaactctcagaatcagtccttgagcgaattggtggtgttctggcaggaccaggagaatctcgtactgaatgaagtttatttgggcaaggaaaaattcgactcagtgcattcaaaatacatgggccgaactagcttcgacagcgacagttggacactgcggctgcacaatttgcaaatcaaagacaagggcctgtatcaatgcatcatccaccataaaaaacccacgggcatgatcagaatccaccagatgaattccgagctttctgtgctcggtggcggtggctctgggggaggtgggtctggaggggggggaagtggcggaggaggttcaggtggagctccagctcagctgccgtgcagtcctaccattccactccaggacctgagtctgttgcgaagagcaggagtgacctggcagcaccagcctgatagcggtcctcctgccgctgcccctgggcaccctctggcacctggcccgcaccccgcagccccctccagctggggacctcgacccaggcgatacacggtcttgtcagtcggcccaggagggttgcgcagcggcagactgccgctgcagccacgagtgcagctcgatgaacgagggcgccagcggggagatttttctctctggctgaggcccgcacgcagggccgacgctggtgagtacagggcagccgtgcacctgagagaccgcgccctgtcttgcaggctcagactccgcctcgggcaggcatcaatgacagcttctccaccaggatccctgcgggcctcagactgggtcatcctcaactgtagcttttcacggcccgaccgccctgccagtgtgcattggttccggaacaggggccaaggtcgggtgcctgtgcgcgagtcacctcaccaccatttggccgaatcctttctgtttctgccccaggtgtcccctatggactctggcccctggggatgtatcctgacttaccgcgatggatttaacgtgagtgggggcgggggtggcagtggcggggggggtagcgggggcggcggaagcgggggcggcggtagtgggcaagtccagctcgtggaaagcggtggaggtctcgtgcaacccggaggctctttgagattgagttgtgccgccagcgggaaaatgtcctcccggcgctgcatggcctggtttaggcaggcaccaggcaaagagcgcgaaagagtggccaagctccttactacttctggcagcacatacttggccgactcagttaagggcagattcaccatttccagagataatagtaagaacacagtgtacctgcaaatgaactcactgagggccgaggataccgctgtctactattgtgccgccgactcttttgaagatcctacatgcaccctcgtgaccagcagtggcgcattccagtactgggggcagggtactctggtgacagtctcatccgaaccaaagtcctccgataagacacacacatgtcctccgtgccctgcccccgaactgctcggcggccctagcgtatttctgttcccacccaagcctaaggacaccctgatgattagtcggacgccagaggtgacgtgcgtggtcgtggccgtttcccacgaagatccagaagttaagtttaattggtacgtggatggcgttgaggtccataatgccaagaccaagcccagagaggaacagtataactcaacttatcgcgtggtaagcgttctcactgtgcttcaccaggattggctgaacggtaaggaatacaaatgtaaagtgagtaataaggctctgccagccggaatcgagaaaacgattagcaaggccaaggggcagcccagagagccccaggtatacaccctcccacccagccgggacgagctcactaagaaccaagtgtctctcacatgcttggtcaagggcttctatccctccgatattgccgtggagtgggaatccaacgggcagccagaaaacaattacaagactacccccccagtgctcgattcagatggaagctttttcctctactccaaactgacggtggataagtctcggtggcagcaggggaacgtgttctcttgtagtgtcatgcatgaggcactgcacaatcactacacccagaagtccctgtcactgagccccggcaag

SEQ ID NO: 173 - protein, 729 aa, synthetic construct
  REGION 1..729: note = CD86 IgV-Envafolimab-LAG3 D1/D2
APLKIQAYFNETADLPCQFANSQNQSLSELVVFWQDQENLVLNEVYLGKEKFDSVHSKYMGRTSFDSDSWTLRLHNLQIKDKGLYQCIIHHKKPTGMIRIHQMNSELSVLGGGGGSGGGGSGGGGSGGGGSGQVQLVESGGGLVQPGGSLRLSCAASGKMSSRRCMAWFRQAPGKERERVAKLLTTSGSTYLADSVKGRFTISRDNSKNTVYLQMNSLRAEDTAVYYCAADSFEDPTCTLVTSSGAFQYWGQGTLVTVSSEPKSSDKTHTCPPCPAPELLGGPSVFLFPPKPKDTLMISRTPEVTCVVVAVSHEDPEVKFNWYVDGVEVHNAKTKPREEQYNSTYRVVSVLTVLHQDWLNGKEYKCKVSNKALPAGIEKTISKAKGQPREPQVYTLPPSRDELTKNQVSLTCLVKGFYPSDIAVEWESNGQPENNYKTTPPVLDSDGSFFLYSKLTVDKSRWQQGNVFSCSVMHEALHNHYTQKSLSLSPGAGGGGSGGGGSGGGGSGGGGSGGAPAQLPCSPTIPLQDLSLLRRAGVTWQHQPDSGPPAAAPGHPLAPGPHPAAPSSWGPRPRRYTVLSVGPGGLRSGRLPLQPRVQLDERGRQRGDFSLWLRPARRADAGEYRAAVHLRDRALSCRLRLRLGQASMTASPPGSLRASDWVILNCSFSRPDRPASVHWFRNRGQGRVPVRESPHHHLAESFLFLPQVSPMDSGPWGCILTYRDGFNVS

SEQ ID NO: 174 - DNA, 2187 bp, synthetic construct
  misc_feature 1..2187: note = CD86 IgV-Envafolimab-LAG3 D1/D2 polynucleotide
  source 1..2187: mol_type = other DNA
gcccctttgaagattcaggcctacttcaatgagacggcagatctgccatgtcagtttgccaactcacagaaccagtcccttagcgaactcgtcgttttctggcaggatcaggaaaacctcgttcttaatgaagtctatctgggcaaggagaaattcgattccgtacactcaaagtacatggggcggacgtcatttgatagcgattcatggacactcagactgcacaatctgcagatcaaagataagggcctgtaccagtgtatcatccaccataaaaaaccaaccggaatgatacgaatccaccagatgaattctgaattgagcgtcctggggggcggagggggtagcggcgggggcgggtcagggggcggcggctctggaggcggcgggagcggacaggtgcagctcgtcgagtctggcggcggtctggtgcagccaggtgggtcactgcgcctgagctgtgccgcaagcggaaagatgtcctcccggagatgtatggcgtggttccggcaagctccaggaaaagagagagagcgcgtggctaaactgttgactacctccggcagcacataccttgctgatagtgtaaagggccgcttcaccataagtagggataactcaaagaataccgtctacctccagatgaacagtttgcgcgctgaggacactgccgtgtattactgtgccgccgacagctttgaagatcccacttgcacgctggtcactagcagtggtgccttccagtactggggccagggaactcttgtaacagtatctagtgaaccgaagagcagcgacaagacccacacatgccccccctgccccgctccagaactgcttgggggcccctccgtgttcctgtttccgcccaagcccaaagatacactcatgatctctaggacccctgaggtgacatgtgtggtggtggccgtgagccacgaggatcctgaggtcaagttcaattggtatgtcgacggggttgaagtccataatgcaaaaaccaagcccagggaggagcagtataactcaacatacagggtcgtttccgtgttgacagtgttgcaccaggattggctcaatggcaaggagtacaaatgtaaggtcagtaacaaagccctccccgccggtatagagaaaacaatctctaaggctaagggccagcctcgagagccacaagtgtacacgctcccaccgtctagagatgagctgacaaagaatcaggtctctctgacatgtttggtgaaaggattttaccccagcgatattgctgtggagtgggaatccaacgggcagcctgagaacaattacaaaaccacaccaccggttttggattcagacgggagcttcttcctgtactcaaaacttaccgttgataagagccgctggcagcagggtaacgttttcagttgttccgtgatgcacgaagctctccacaaccactatacacaaaagtctctgagcttgagcccaggcgcgggtggcgggggctccggagggggtggctctgggggaggcggctcaggaggcggtggctccggcggggcaccagcacagctgccatgcagtcccacgatccccctgcaggatctctcactgctgcgccgggcaggtgtcacctggcagcaccagccagacagtggacccccagccgccgcacctggccacccacttgcgccaggcccacatccagccgccccctcaagctgggggccccggcctcgccggtacaccgttctttccgtgggacccggcggcctgcgatccggtcgcttgcccctgcagccaagggtgcagttggatgaaagagggagacagagaggggacttctccctgtggctgcggcccgcccgaagggcggatgcaggagagtatcgcgccgccgtgcacctgagagacagggcactgagctgcaggctgcggctccgcctgggccaggctagcatgaccgccagcccgccaggctcactgagggctagtgactgggtcatactgaattgctcattctcacgacccgacagacccgccagtgtccactggttccgaaatcgcggccaggggcgcgttcccgttagggaaagcccgcaccaccacctggcagagagttttctctttttgccacaggtaagccctatggatagcggcccttggggctgtatcctcacatacagggacgggttcaacgtctct

SEQ ID NO: 175 - DNA, 2088 bp, synthetic construct
  misc_feature 1..2088: note = Durvalumab heavy chain -CD86 polynucleotide
  source 1..2088: mol_type = other DNA
gaagtacaacttgtggaaagtggcggaggccttgtccaacctggtggctcattgcgactctcatgcgctgctagtggattcactttttctcgatactggatgtcatgggtccggcaggctccaggtaaaggcctggaatgggtcgctaatattaaacaggatgggagcgaaaagtactatgttgattccgtcaaaggccggtttaccatctctcgggacaacgcgaagaactcactctatttgcagatgaactctctcagggcagaggacaccgccgtttattactgtgcaagggagggcggttggttcggcgaactggcattcgactattgggggcaagggaccctggtgacagtgtcttctgcctcaaccaaaggtccctcagtatttcctttggccccttcatccaaatccacttccggaggtactgcggcgcttggttgtttggtgaaggactactttcccgagccagtgaccgtgtcatggaactcaggggccctgacgagtggagtccacacattcccggcagtccttcaatcttcaggactgtactcactgagttcagtggtcacagtgccaagcagctcactgggtactcagacgtatatttgcaacgtgaaccacaaaccaagcaacactaaggttgacaagcgcgtggaacctaagtcatgtgacaaaacacatacttgtccaccgtgtcccgctcctgaattcgaaggaggaccatctgtgtttctgtttccacctaagcccaaggacacactgatgatcagtcggacacccgaggtgacgtgtgtcgtagtggatgttagccatgaagatcccgaggtcaaattcaattggtacgtcgacggggtggaagtccataatgctaagacaaagccccgggaagagcagtacaattcaacctaccgggtcgtgagcgtcctgaccgtcctgcatcaggattggctgaatggaaaggagtacaaatgcaaggtgagtaacaaagccctgcccgcgagcatcgagaagacaatctctaaggctaaaggccagccacgcgaaccgcaggtgtatactcttccaccttcacgggaagagatgacaaagaaccaagtatcccttacgtgcctggtgaagggattctaccccagcgatatcgctgtcgagtgggaatccaacggccagcctgagaataactataagaccaccccccctgtgcttgacagcgatgggtctttctttctctactctaagctgaccgtggacaagagcaggtggcaacaagggaacgtcttctcctgtagcgttatgcacgaggcattgcacaaccattacacacaaaaaagtctctcactttcccctggagcaggaggaggaggatcaggtggaggtgggtctggtggaggagggtcaggaggaggaggaagtggtgctcctctcaagattcaggcctattttaacgaaacagccgatctgccttgtcagtttgctaacagccagaatcagtcattgagtgaactggtggttttctggcaggaccaggagaacctggtgctgaatgaagtgtacctgggaaaggaaaaatttgacagcgtgcacagcaagtacatgggtagaacttccttcgactctgatagctggacattgcggctgcacaatctgcagattaaagacaaaggactgtatcagtgcattattcaccacaagaagccaacaggtatgatcagaatccaccagatgaatagcgagcttagcgtgctggctaacttcagtcagcccgaaattgtgcccatatcaaacatcaccgagaatgtttacatcaatctgacttgcagctctatacatgggtaccctgagcctaaaaagatgagcgtcctgctgaggaccaagaacagcaccattgaatacgacggagtaatgcagaagagccaggacaatgtcaccgagctgtacgatgtctcaatctcactttcagtgtcctttccagacgtgacatctaatatgaccattttttgcatcctggagaccgacaaaactcggttgctttcttcccctttttcaatcgaattggaggatccacagccaccccctgaccacattccc

SEQ ID NO: 176 - DNA, 645 bp, synthetic construct
  misc_feature 1..645: note = Durvalumab light chain polynucleotide
  source 1..645: mol_type = other DNA
gagatcgtgcttacacagtctccaggaaccctgtcacttagcccaggtgaacgggccactttgagctgcagagcttcacagagggtaagcagctcctatcttgcctggtatcagcagaaacctgggcaagccccgcgactgttgatctatgacgcttcttctcgggccaccggtatacccgacaggttttcagggtctggcagcgggaccgactttactctgactatttcacgcctggagccagaggatttcgccgtgtactactgtcagcagtacggctcacttccttggacttttgggcaggggactaaagtggagattaagcggactgtagctgcaccctccgtcttcatttttccaccctctgatgagcagctcaagtctggcacagcttctgttgtgtgtctgttgaataatttctatcctcgggaggccaaggtgcagtggaaggtcgataatgctctgcagagtggtaacagccaggaatctgtgacagagcaggatagtaaggatagcacctattctttgtcctcaactttgactctctccaaggctgactacgaaaagcataaggtgtatgcatgtgaagtgacccaccaagggctttcctcccccgtgaccaagtcatttaaccgaggggagtgc

SEQ ID NO: 177 - DNA, 1353 bp, synthetic construct
  misc_feature 1..1353: note = Durvalumab heavy chain polynucleotide
  source 1..1353: mol_type = other DNA
gaagttcaacttgttgaatctggaggaggactggtgcagcctgggggatctcttcggctgtcttgtgcagcatctgggttcacctttagcaggtactggatgagctgggtgcggcaagctcccggaaaagggctggagtgggttgctaacatcaaacaggacggctcagagaaatattatgtggactccgtcaaaggccgcttcacaattagccgggataatgcgaagaactcactctacctgcagatgaacagcctgagagctgaggacaccgccgtgtactattgtgctagagaaggtggatggttcggcgagttggcttttgactactggggtcagggcactttggtcacggtctctagcgcgagtaccaaaggaccaagcgttttccctctcgccccttccagtaagagtacttctggtgggactgcagcccttgggtgtctcgttaaagattatttcccagaacctgtaacagtgtcttggaactcaggcgcactgacctcaggggtacatacatttcccgcagtgcttcagtcctccggactgtacagtttgtccagcgtggttaccgtgccaagctcatccttgggtacccaaacctatatctgtaacgtgaatcacaagcccagcaacaccaaggtcgataagcgagtggagcctaagtcctgcgacaagacacacacttgccccccttgcccagctcctgagttcgaaggtggcccaagtgtctttctgtttccgccaaaaccaaaggatacactgatgatcagtagaacacccgaagtcacttgtgtggtggttgacgtgtctcacgaagatccagaagtcaagttcaactggtatgtggatggggtagaggttcacaacgcaaaaacgaagccgcgcgaagagcagtacaactcaacatacagagtggtaagtgtgcttactgtcctccaccaagactggctgaatgggaaggagtataagtgtaaagtgtcaaataaggccttgccagcatccatcgaaaagacaatctccaaggccaagggtcagcctcgggaaccccaagtatacactctgcctccatctcgagaggagatgaccaagaatcaggttagcctgacttgcctcgtgaagggcttctacccctctgacatcgcagtggagtgggagtccaatggtcagcccgaaaataattacaaaactacaccccctgttctggactctgacggcagcttcttcctttattccaaattgactgtggacaaatctcgatggcagcagggaaacgtgttttcctgtagcgtcatgcacgaagctctccataatcactacactcaaaagagcctctcactgagccccgggaag

SEQ ID NO: 178 - protein, 110 aa, synthetic construct
  REGION 1..110: note = CD86 IgV-Q25I/F33L/H90I
APLKIQAYFNETADLPCQFANSQNISLSELVVLWQDQENLVLNEVYLGKEKFDSVHSKYMGRTSFDSDSWTLRLHNLQIKDKGLYQCIIIHKKPTGMIRIHQMNSELSVL

SEQ ID NO: 179 - protein, 110 aa, synthetic construct
  REGION 1..110: note = CD86 IgV-Q25V/F33L/H90I
APLKIQAYFNETADLPCQFANSQNVSLSELVVLWQDQENLVLNEVYLGKEKFDSVHSKYMGRTSFDSDSWTLRLHNLQIKDKGLYQCIIIHKKPTGMIRIHQMNSELSVL

SEQ ID NO: 180 - protein, 110 aa, synthetic construct
  REGION 1..110: note = CD86 IgV-Q25I/F33V/H90I
APLKIQAYFNETADLPCQFANSQNISLSELVVVWQDQENLVLNEVYLGKEKFDSVHSKYMGRTSFDSDSWTLRLHNLQIKDKGLYQCIIIHKKPTGMIRIHQMNSELSVL

SEQ ID NO: 181 - protein, 110 aa, synthetic construct
  REGION 1..110: note = CD86 IgV-Q25V/F33V/H90I
APLKIQAYFNETADLPCQFANSQNVSLSELVVVWQDQENLVLNEVYLGKEKFDSVHSKYMGRTSFDSDSWTLRLHNLQIKDKGLYQCIIIHKKPTGMIRIHQMNSELSVL

SEQ ID NO: 182 - protein, 110 aa, synthetic construct
  REGION 1..110: note = CD86 IgV-Q25I/F33L/H90V
APLKIQAYFNETADLPCQFANSQNISLSELVVLWQDQENLVLNEVYLGKEKFDSVHSKYMGRTSFDSDSWTLRLHNLQIKDKGLYQCIIVHKKPTGMIRIHQMNSELSVL

SEQ ID NO: 183 - protein, 110 aa, synthetic construct
  REGION 1..110: note = CD86 IgV-Q25V/F33L/H90V
APLKIQAYFNETADLPCQFANSQNVSLSELVVLWQDQENLVLNEVYLGKEKFDSVHSKYMGRTSFDSDSWTLRLHNLQIKDKGLYQCIIVHKKPTGMIRIHQMNSELSVL

SEQ ID NO: 184 - protein, 110 aa, synthetic construct
  REGION 1..110: note = CD86 IgV-Q25I/F33V/H90V
APLKIQAYFNETADLPCQFANSQNISLSELVVVWQDQENLVLNEVYLGKEKFDSVHSKYMGRTSFDSDSWTLRLHNLQIKDKGLYQCIIVHKKPTGMIRIHQMNSELSVL

SEQ ID NO: 185 - protein, 110 aa, synthetic construct
  REGION 1..110: note = CD86 IgV-Q25V/F33V/H90V
APLKIQAYFNETADLPCQFANSQNVSLSELVVVWQDQENLVLNEVYLGKEKFDSVHSKYMGRTSFDSDSWTLRLHNLQIKDKGLYQCIIVHKKPTGMIRIHQMNSELSVL

SEQ ID NO: 186 - protein, 110 aa, synthetic construct
  REGION 1..110: note = CD86 IgV-A13L/Q25I/F33L/H90I
APLKIQAYFNETLDLPCQFANSQNISLSELVVLWQDQENLVLNEVYLGKEKFDSVHSKYMGRTSFDSDSWTLRLHNLQIKDKGLYQCIIIHKKPTGMIRIHQMNSELSVL

SEQ ID NO: 187 - protein, 110 aa, synthetic construct
  REGION 1..110: note = CD86 IgV-A13I/Q25I/F33L/H90I
APLKIQAYFNETIDLPCQFANSQNISLSELVVLWQDQENLVLNEVYLGKEKFDSVHSKYMGRTSFDSDSWTLRLHNLQIKDKGLYQCIIIHKKPTGMIRIHQMNSELSVL

SEQ ID NO: 188 - protein, 110 aa, synthetic construct
  REGION 1..110: note = CD86 IgV-A13L/Q25V/F33L/H90I
APLKIQAYFNETLDLPCQFANSQNVSLSELVVLWQDQENLVLNEVYLGKEKFDSVHSKYMGRTSFDSDSWTLRLHNLQIKDKGLYQCIIIHKKPTGMIRIHQMNSELSVL

SEQ ID NO: 189 - protein, 110 aa, synthetic construct
  REGION 1..110: note = CD86 IgV-A13I/Q25V/F33L/H90I
APLKIQAYFNETIDLPCQFANSQNVSLSELVVLWQDQENLVLNEVYLGKEKFDSVHSKYMGRTSFDSDSWTLRLHNLQIKDKGLYQCIIIHKKPTGMIRIHQMNSELSVL

SEQ ID NO: 190 - protein, 110 aa, synthetic construct
  REGION 1..110: note = CD86 IgV-Q25I/F33L/I89L/H90I
APLKIQAYFNETADLPCQFANSQNISLSELVVLWQDQENLVLNEVYLGKEKFDSVHSKYMGRTSFDSDSWTLRLHNLQIKDKGLYQCILIHKKPTGMIRIHQMNSELSVL

SEQ ID NO: 191 - protein, 110 aa, synthetic construct
  REGION 1..110: note = CD86 IgV-Q25I/F33L/M60R/H90I
APLKIQAYFNETADLPCQFANSQNISLSELVVLWQDQENLVLNEVYLGKEKFDSVHSKYRGRTSFDSDSWTLRLHNLQIKDKGLYQCIIIHKKPTGMIRIHQMNSELSVL

SEQ ID NO: 192 - protein, 110 aa, synthetic construct
  REGION 1..110: note = CD86 IgV-Q25V/F33L/I89L/H90I
APLKIQAYFNETADLPCQFANSQNVSLSELVVLWQDQENLVLNEVYLGKEKFDSVHSKYMGRTSFDSDSWTLRLHNLQIKDKGLYQCILIHKKPTGMIRIHQMNSELSVL

SEQ ID NO: 193 - protein, 110 aa, synthetic construct
  REGION 1..110: note = CD86 IgV-Q25V/F33L/M60R/H90I
APLKIQAYFNETADLPCQFANSQNVSLSELVVLWQDQENLVLNEVYLGKEKFDSVHSKYRGRTSFDSDSWTLRLHNLQIKDKGLYQCIIIHKKPTGMIRIHQMNSELSVL

SEQ ID NO: 194 - protein, 110 aa, synthetic construct
  REGION 1..110: note = CD86 IgV-Q25F/F33L/H90I
APLKIQAYFNETADLPCQFANSQNFSLSELVVLWQDQENLVLNEVYLGKEKFDSVHSKYMGRTSFDSDSWTLRLHNLQIKDKGLYQCIIIHKKPTGMIRIHQMNSELSVL

SEQ ID NO: 195 - protein, 110 aa, synthetic construct
  REGION 1..110: note = CD86 IgV-Q25I/F33L/H90F
APLKIQAYFNETADLPCQFANSQNISLSELVVLWQDQENLVLNEVYLGKEKFDSVHSKYMGRTSFDSDSWTLRLHNLQIKDKGLYQCIIFHKKPTGMIRIHQMNSELSVL

SEQ ID NO: 196 - protein, 110 aa, synthetic construct
  REGION 1..110: note = CD86 IgV-Q25I/F33A/H90I
APLKIQAYFNETADLPCQFANSQNISLSELVVAWQDQENLVLNEVYLGKEKFDSVHSKYMGRTSFDSDSWTLRLHNLQIKDKGLYQCIIIHKKPTGMIRIHQMNSELSVL

SEQ ID NO: 197 - protein, 110 aa, synthetic construct
  REGION 1..110: note = CD86 IgV-Q25I/H90I
APLKIQAYFNETADLPCQFANSQNISLSELVVFWQDQENLVLNEVYLGKEKFDSVHSKYMGRTSFDSDSWTLRLHNLQIKDKGLYQCIIIHKKPTGMIRIHQMNSELSVL

SEQ ID NO: 198 - protein, 110 aa, synthetic construct
  REGION 1..110: note = CD86 IgV-Q25V/H90V
APLKIQAYFNETADLPCQFANSQNVSLSELVVFWQDQENLVLNEVYLGKEKFDSVHSKYMGRTSFDSDSWTLRLHNLQIKDKGLYQCIIVHKKPTGMIRIHQMNSELSVL

SEQ ID NO: 199 - protein, 110 aa, synthetic construct
  REGION 1..110: note = CD86 IgV-Q25V/H90I
APLKIQAYFNETADLPCQFANSQNVSLSELVVFWQDQENLVLNEVYLGKEKFDSVHSKYMGRTSFDSDSWTLRLHNLQIKDKGLYQCIIIHKKPTGMIRIHQMNSELSVL

SEQ ID NO: 200 - protein, 110 aa, synthetic construct
  REGION 1..110: note = CD86 IgV-Q25F/H90I
APLKIQAYFNETADLPCQFANSQNFSLSELVVFWQDQENLVLNEVYLGKEKFDSVHSKYMGRTSFDSDSWTLRLHNLQIKDKGLYQCIIIHKKPTGMIRIHQMNSELSVL

SEQ ID NO: 201 - protein, 110 aa, synthetic construct
  REGION 1..110: note = CD86 IgV-Q25F/H90V
APLKIQAYFNETADLPCQFANSQNFSLSELVVFWQDQENLVLNEVYLGKEKFDSVHSKYMGRTSFDSDSWTLRLHNLQIKDKGLYQCIIVHKKPTGMIRIHQMNSELSVL

SEQ ID NO: 202 - protein, 110 aa, synthetic construct
  REGION 1..110: note = CD86 IgV-A13F/Q25I/F33L/H90I
APLKIQAYFNETFDLPCQFANSQNISLSELVVLWQDQENLVLNEVYLGKEKFDSVHSKYMGRTSFDSDSWTLRLHNLQIKDKGLYQCIIIHKKPTGMIRIHQMNSELSVL

SEQ ID NO: 203 - protein, 110 aa, synthetic construct
  REGION 1..110: note = CD86 IgV-A13M/Q25I/F33L/H90I
APLKIQAYFNETMDLPCQFANSQNISLSELVVLWQDQENLVLNEVYLGKEKFDSVHSKYMGRTSFDSDSWTLRLHNLQIKDKGLYQCIIIHKKPTGMIRIHQMNSELSVL

SEQ ID NO: 204 - protein, 110 aa, synthetic construct
  REGION 1..110: note = CD86 IgV-Q25A/F33L/H90I
APLKIQAYFNETADLPCQFANSQNASLSELVVLWQDQENLVLNEVYLGKEKFDSVHSKYMGRTSFDSDSWTLRLHNLQIKDKGLYQCIIIHKKPTGMIRIHQMNSELSVL

SEQ ID NO: 205 - protein, 110 aa, synthetic construct
  REGION 1..110: note = CD86 IgV-Q25M/F33L/H90I
APLKIQAYFNETADLPCQFANSQNMSLSELVVLWQDQENLVLNEVYLGKEKFDSVHSKYMGRTSFDSDSWTLRLHNLQIKDKGLYQCIIIHKKPTGMIRIHQMNSELSVL

SEQ ID NO: 206 - protein, 110 aa, synthetic construct
  REGION 1..110: note = CD86 IgV-Q25I/F33M/H90I
APLKIQAYFNETADLPCQFANSQNISLSELVVMWQDQENLVLNEVYLGKEKFDSVHSKYMGRTSFDSDSWTLRLHNLQIKDKGLYQCIIIHKKPTGMIRIHQMNSELSVL

SEQ ID NO: 207 - protein, 110 aa, synthetic construct
  REGION 1..110: note = CD86 IgV-Q25I/F33L/I89V/H90I
APLKIQAYFNETADLPCQFANSQNISLSELVVLWQDQENLVLNEVYLGKEKFDSVHSKYMGRTSFDSDSWTLRLHNLQIKDKGLYQCIVIHKKPTGMIRIHQMNSELSVL

SEQ ID NO: 208 - protein, 110 aa, synthetic construct
  REGION 1..110: note = CD86 IgV-Q25I/F33L/I89F/H90I
APLKIQAYFNETADLPCQFANSQNISLSELVVLWQDQENLVLNEVYLGKEKFDSVHSKYMGRTSFDSDSWTLRLHNLQIKDKGLYQCIFIHKKPTGMIRIHQMNSELSVL

SEQ ID NO: 209 - protein, 110 aa, synthetic construct
  REGION 1..110: note = CD86 IgV-Q25I/F33L/I89M/H90I
APLKIQAYFNETADLPCQFANSQNISLSELVVLWQDQENLVLNEVYLGKEKFDSVHSKYMGRTSFDSDSWTLRLHNLQIKDKGLYQCIMIHKKPTGMIRIHQMNSELSVL

SEQ ID NO: 210 - protein, 110 aa, synthetic construct
  REGION 1..110: note = CD86 IgV-Q25I/F33L/H90M
APLKIQAYFNETADLPCQFANSQNISLSELVVLWQDQENLVLNEVYLGKEKFDSVHSKYMGRTSFDSDSWTLRLHNLQIKDKGLYQCIIMHKKPTGMIRIHQMNSELSVL

SEQ ID NO: 211 - protein, 224 aa, synthetic construct
  REGION 1..224: note = CD86 ECD-Q25I/F33L/H90I
APLKIQAYFNETADLPCQFANSQNISLSELVVLWQDQENLVLNEVYLGKEKFDSVHSKYMGRTSFDSDSWTLRLHNLQIKDKGLYQCIIIHKKPTGMIRIHQMNSELSVLANFSQPEIVPISNITENVYINLTCSSIHGYPEPKKMSVLLRTKNSTIEYDGVMQKSQDNVTELYDVSISLSVSFPDVTSNMTIFCILETDKTRLLSSPFSIELEDPQPPPDHIP

SEQ ID NO: 212 - protein, 224 aa, synthetic construct
  REGION 1..224: note = CD86 ECD-Q25V/F33L/H90I
APLKIQAYFNETADLPCQFANSQNVSLSELVVLWQDQENLVLNEVYLGKEKFDSVHSKYMGRTSFDSDSWTLRLHNLQIKDKGLYQCIIIHKKPTGMIRIHQMNSELSVLANFSQPEIVPISNITENVYINLTCSSIHGYPEPKKMSVLLRTKNSTIEYDGVMQKSQDNVTELYDVSISLSVSFPDVTSNMTIFCILETDKTRLLSSPFSIELEDPQPPPDHIP

SEQ ID NO: 213 - protein, 224 aa, synthetic construct
  REGION 1..224: note = CD86 ECD-Q25I/F33V/H90I
APLKIQAYFNETADLPCQFANSQNISLSELVVVWQDQENLVLNEVYLGKEKFDSVHSKYMGRTSFDSDSWTLRLHNLQIKDKGLYQCIIIHKKPTGMIRIHQMNSELSVLANFSQPEIVPISNITENVYINLTCSSIHGYPEPKKMSVLLRTKNSTIEYDGVMQKSQDNVTELYDVSISLSVSFPDVTSNMTIFCILETDKTRLLSSPFSIELEDPQPPPDHIP

SEQ ID NO: 214 - protein, 224 aa, synthetic construct
  REGION 1..224: note = CD86 ECD-Q25V/F33V/H90I
APLKIQAYFNETADLPCQFANSQNVSLSELVVVWQDQENLVLNEVYLGKEKFDSVHSKYMGRTSFDSDSWTLRLHNLQIKDKGLYQCIIIHKKPTGMIRIHQMNSELSVLANFSQPEIVPISNITENVYINLTCSSIHGYPEPKKMSVLLRTKNSTIEYDGVMQKSQDNVTELYDVSISLSVSFPDVTSNMTIFCILETDKTRLLSSPFSIELEDPQPPPDHIP

SEQ ID NO: 215 - protein, 224 aa, synthetic construct
  REGION 1..224: note = CD86 ECD-Q25I/F33L/H90V
APLKIQAYFNETADLPCQFANSQNISLSELVVLWQDQENLVLNEVYLGKEKFDSVHSKYMGRTSFDSDSWTLRLHNLQIKDKGLYQCIIVHKKPTGMIRIHQMNSELSVLANFSQPEIVPISNITENVYINLTCSSIHGYPEPKKMSVLLRTKNSTIEYDGVMQKSQDNVTELYDVSISLSVSFPDVTSNMTIFCILETDKTRLLSSPFSIELEDPQPPPDHIP

SEQ ID NO: 216 - protein, 224 aa, synthetic construct
  REGION 1..224: note = CD86 ECD-Q25V/F33L/H90V
APLKIQAYFNETADLPCQFANSQNVSLSELVVLWQDQENLVLNEVYLGKEKFDSVHSKYMGRTSFDSDSWTLRLHNLQIKDKGLYQCIIVHKKPTGMIRIHQMNSELSVLANFSQPEIVPISNITENVYINLTCSSIHGYPEPKKMSVLLRTKNSTIEYDGVMQKSQDNVTELYDVSISLSVSFPDVTSNMTIFCILETDKTRLLSSPFSIELEDPQPPPDHIP

SEQ ID NO: 217 - protein, 224 aa, synthetic construct
  REGION 1..224: note = CD86 ECD-Q25I/F33V/H90V
APLKIQAYFNETADLPCQFANSQNISLSELVVVWQDQENLVLNEVYLGKEKFDSVHSKYMGRTSFDSDSWTLRLHNLQIKDKGLYQCIIVHKKPTGMIRIHQMNSELSVLANFSQPEIVPISNITENVYINLTCSSIHGYPEPKKMSVLLRTKNSTIEYDGVMQKSQDNVTELYDVSISLSVSFPDVTSNMTIFCILETDKTRLLSSPFSIELEDPQPPPDHIP

SEQ ID NO: 218 - protein, 224 aa, synthetic construct
  REGION 1..224: note = CD86 ECD-Q25V/F33V/H90V
APLKIQAYFNETADLPCQFANSQNVSLSELVVVWQDQENLVLNEVYLGKEKFDSVHSKYMGRTSFDSDSWTLRLHNLQIKDKGLYQCIIVHKKPTGMIRIHQMNSELSVLANFSQPEIVPISNITENVYINLTCSSIHGYPEPKKMSVLLRTKNSTIEYDGVMQKSQDNVTELYDVSISLSVSFPDVTSNMTIFCILETDKTRLLSSPFSIELEDPQPPPDHIP

SEQ ID NO: 219 - protein, 224 aa, synthetic construct
  REGION 1..224: note = CD86 ECD-A13L/Q25I/F33L/H90I
APLKIQAYFNETLDLPCQFANSQNISLSELVVLWQDQENLVLNEVYLGKEKFDSVHSKYMGRTSFDSDSWTLRLHNLQIKDKGLYQCIIIHKKPTGMIRIHQMNSELSVLANFSQPEIVPISNITENVYINLTCSSIHGYPEPKKMSVLLRTKNSTIEYDGVMQKSQDNVTELYDVSISLSVSFPDVTSNMTIFCILETDKTRLLSSPFSIELEDPQPPPDHIP

SEQ ID NO: 220 - protein, 224 aa, synthetic construct
  REGION 1..224: note = CD86 ECD-A13I/Q25I/F33L/H90I
APLKIQAYFNETIDLPCQFANSQNISLSELVVLWQDQENLVLNEVYLGKEKFDSVHSKYMGRTSFDSDSWTLRLHNLQIKDKGLYQCIIIHKKPTGMIRIHQMNSELSVLANFSQPEIVPISNITENVYINLTCSSIHGYPEPKKMSVLLRTKNSTIEYDGVMQKSQDNVTELYDVSISLSVSFPDVTSNMTIFCILETDKTRLLSSPFSIELEDPQPPPDHIP

SEQ ID NO: 221 - protein, 224 aa, synthetic construct
  REGION 1..224: note = CD86 ECD-A13L/Q25V/F33L/H90I
APLKIQAYFNETLDLPCQFANSQNVSLSELVVLWQDQENLVLNEVYLGKEKFDSVHSKYMGRTSFDSDSWTLRLHNLQIKDKGLYQCIIIHKKPTGMIRIHQMNSELSVLANFSQPEIVPISNITENVYINLTCSSIHGYPEPKKMSVLLRTKNSTIEYDGVMQKSQDNVTELYDVSISLSVSFPDVTSNMTIFCILETDKTRLLSSPFSIELEDPQPPPDHIP

SEQ ID NO: 222 - protein, 224 aa, synthetic construct
  REGION 1..224: note = CD86 ECD-A13I/Q25V/F33L/H90I
APLKIQAYFNETIDLPCQFANSQNVSLSELVVLWQDQENLVLNEVYLGKEKFDSVHSKYMGRTSFDSDSWTLRLHNLQIKDKGLYQCIIIHKKPTGMIRIHQMNSELSVLANFSQPEIVPISNITENVYINLTCSSIHGYPEPKKMSVLLRTKNSTIEYDGVMQKSQDNVTELYDVSISLSVSFPDVTSNMTIFCILETDKTRLLSSPFSIELEDPQPPPDHIP

SEQ ID NO: 223 - protein, 224 aa, synthetic construct
  REGION 1..224: note = CD86 ECD-Q25I/F33L/I89L/H90I
APLKIQAYFNETADLPCQFANSQNISLSELVVLWQDQENLVLNEVYLGKEKFDSVHSKYMGRTSFDSDSWTLRLHNLQIKDKGLYQCILIHKKPTGMIRIHQMNSELSVLANFSQPEIVPISNITENVYINLTCSSIHGYPEPKKMSVLLRTKNSTIEYDGVMQKSQDNVTELYDVSISLSVSFPDVTSNMTIFCILETDKTRLLSSPFSIELEDPQPPPDHIP

SEQ ID NO: 224 - protein, 224 aa, synthetic construct
  REGION 1..224: note = CD86 ECD-Q25I/F33L/M60R/H90I
APLKIQAYFNETADLPCQFANSQNISLSELVVLWQDQENLVLNEVYLGKEKFDSVHSKYRGRTSFDSDSWTLRLHNLQIKDKGLYQCIIIHKKPTGMIRIHQMNSELSVLANFSQPEIVPISNITENVYINLTCSSIHGYPEPKKMSVLLRTKNSTIEYDGVMQKSQDNVTELYDVSISLSVSFPDVTSNMTIFCILETDKTRLLSSPFSIELEDPQPPPDHIP

SEQ ID NO: 225 - protein, 224 aa, synthetic construct
  REGION 1..224: note = CD86 ECD-Q25V/F33L/I89L/H90I
APLKIQAYFNETADLPCQFANSQNVSLSELVVLWQDQENLVLNEVYLGKEKFDSVHSKYMGRTSFDSDSWTLRLHNLQIKDKGLYQCILIHKKPTGMIRIHQMNSELSVLANFSQPEIVPISNITENVYINLTCSSIHGYPEPKKMSVLLRTKNSTIEYDGVMQKSQDNVTELYDVSISLSVSFPDVTSNMTIFCILETDKTRLLSSPFSIELEDPQPPPDHIP

SEQ ID NO: 226 - protein, 224 aa, synthetic construct
  REGION 1..224: note = CD86 ECD-Q25V/F33L/M60R/H90I
APLKIQAYFNETADLPCQFANSQNVSLSELVVLWQDQENLVLNEVYLGKEKFDSVHSKYRGRTSFDSDSWTLRLHNLQIKDKGLYQCIIIHKKPTGMIRIHQMNSELSVLANFSQPEIVPISNITENVYINLTCSSIHGYPEPKKMSVLLRTKNSTIEYDGVMQKSQDNVTELYDVSISLSVSFPDVTSNMTIFCILETDKTRLLSSPFSIELEDPQPPPDHIP

SEQ ID NO: 227 - protein, 224 aa, synthetic construct
  REGION 1..224: note = CD86 ECD-Q25F/F33L/H90I
APLKIQAYFNETADLPCQFANSQNFSLSELVVLWQDQENLVLNEVYLGKEKFDSVHSKYMGRTSFDSDSWTLRLHNLQIKDKGLYQCIIIHKKPTGMIRIHQMNSELSVLANFSQPEIVPISNITENVYINLTCSSIHGYPEPKKMSVLLRTKNSTIEYDGVMQKSQDNVTELYDVSISLSVSFPDVTSNMTIFCILETDKTRLLSSPFSIELEDPQPPPDHIP

SEQ ID NO: 228 - protein, 224 aa, synthetic construct
  REGION 1..224: note = CD86 ECD-Q25I/F33L/H90F
APLKIQAYFNETADLPCQFANSQNISLSELVVLWQDQENLVLNEVYLGKEKFDSVHSKYMGRTSFDSDSWTLRLHNLQIKDKGLYQCIIFHKKPTGMIRIHQMNSELSVLANFSQPEIVPISNITENVYINLTCSSIHGYPEPKKMSVLLRTKNSTIEYDGVMQKSQDNVTELYDVSISLSVSFPDVTSNMTIFCILETDKTRLLSSPFSIELEDPQPPPDHIP

SEQ ID NO: 229 - protein, 224 aa, synthetic construct
  REGION 1..224: note = CD86 ECD-Q25I/F33A/H90I
APLKIQAYFNETADLPCQFANSQNISLSELVVAWQDQENLVLNEVYLGKEKFDSVHSKYMGRTSFDSDSWTLRLHNLQIKDKGLYQCIIIHKKPTGMIRIHQMNSELSVLANFSQPEIVPISNITENVYINLTCSSIHGYPEPKKMSVLLRTKNSTIEYDGVMQKSQDNVTELYDVSISLSVSFPDVTSNMTIFCILETDKTRLLSSPFSIELEDPQPPPDHIP

SEQ ID NO: 230 - protein, 224 aa, synthetic construct
  REGION 1..224: note = CD86 ECD-Q25I/H90I
APLKIQAYFNETADLPCQFANSQNISLSELVVFWQDQENLVLNEVYLGKEKFDSVHSKYMGRTSFDSDSWTLRLHNLQIKDKGLYQCIIIHKKPTGMIRIHQMNSELSVLANFSQPEIVPISNITENVYINLTCSSIHGYPEPKKMSVLLRTKNSTIEYDGVMQKSQDNVTELYDVSISLSVSFPDVTSNMTIFCILETDKTRLLSSPFSIELEDPQPPPDHIP

SEQ ID NO: 231 - protein, 224 aa, synthetic construct
  REGION 1..224: note = CD86 ECD-Q25V/H90V
APLKIQAYFNETADLPCQFANSQNVSLSELVVFWQDQENLVLNEVYLGKEKFDSVHSKYMGRTSFDSDSWTLRLHNLQIKDKGLYQCIIVHKKPTGMIRIHQMNSELSVLANFSQPEIVPISNITENVYINLTCSSIHGYPEPKKMSVLLRTKNSTIEYDGVMQKSQDNVTELYDVSISLSVSFPDVTSNMTIFCILETDKTRLLSSPFSIELEDPQPPPDHIP

SEQ ID NO: 232 - protein, 224 aa, synthetic construct
  REGION 1..224: note = CD86 ECD-Q25V/H90I
APLKIQAYFNETADLPCQFANSQNVSLSELVVFWQDQENLVLNEVYLGKEKFDSVHSKYMGRTSFDSDSWTLRLHNLQIKDKGLYQCIIIHKKPTGMIRIHQMNSELSVLANFSQPEIVPISNITENVYINLTCSSIHGYPEPKKMSVLLRTKNSTIEYDGVMQKSQDNVTELYDVSISLSVSFPDVTSNMTIFCILETDKTRLLSSPFSIELEDPQPPPDHIP

SEQ ID NO: 233 - protein, 224 aa, synthetic construct
  REGION 1..224: note = CD86 ECD-Q25F/H90I
APLKIQAYFNETADLPCQFANSQNFSLSELVVFWQDQENLVLNEVYLGKEKFDSVHSKYMGRTSFDSDSWTLRLHNLQIKDKGLYQCIIIHKKPTGMIRIHQMNSELSVLANFSQPEIVPISNITENVYINLTCSSIHGYPEPKKMSVLLRTKNSTIEYDGVMQKSQDNVTELYDVSISLSVSFPDVTSNMTIFCILETDKTRLLSSPFSIELEDPQPPPDHIP

SEQ ID NO: 234 - protein, 224 aa, synthetic construct
  REGION 1..224: note = CD86 ECD-Q25F/H90V
APLKIQAYFNETADLPCQFANSQNFSLSELVVFWQDQENLVLNEVYLGKEKFDSVHSKYMGRTSFDSDSWTLRLHNLQIKDKGLYQCIIVHKKPTGMIRIHQMNSELSVLANFSQPEIVPISNITENVYINLTCSSIHGYPEPKKMSVLLRTKNSTIEYDGVMQKSQDNVTELYDVSISLSVSFPDVTSNMTIFCILETDKTRLLSSPFSIELEDPQPPPDHIP

SEQ ID NO: 235 - protein, 224 aa, synthetic construct
  REGION 1..224: note = CD86 ECD-A13F/Q25I/F33L/H90I
APLKIQAYFNETFDLPCQFANSQNISLSELVVLWQDQENLVLNEVYLGKEKFDSVHSKYMGRTSFDSDSWTLRLHNLQIKDKGLYQCIIIHKKPTGMIRIHQMNSELSVLANFSQPEIVPISNITENVYINLTCSSIHGYPEPKKMSVLLRTKNSTIEYDGVMQKSQDNVTELYDVSISLSVSFPDVTSNMTIFCILETDKTRLLSSPFSIELEDPQPPPDHIP

SEQ ID NO: 236 - protein, 224 aa, synthetic construct
  REGION 1..224: note = CD86 ECD-A13M/Q25I/F33L/H90I
APLKIQAYFNETMDLPCQFANSQNISLSELVVLWQDQENLVLNEVYLGKEKFDSVHSKYMGRTSFDSDSWTLRLHNLQIKDKGLYQCIIIHKKPTGMIRIHQMNSELSVLANFSQPEIVPISNITENVYINLTCSSIHGYPEPKKMSVLLRTKNSTIEYDGVMQKSQDNVTELYDVSISLSVSFPDVTSNMTIFCILETDKTRLLSSPFSIELEDPQPPPDHIP

SEQ ID NO: 237 - protein, 224 aa, synthetic construct
  REGION 1..224: note = CD86 ECD-Q25A/F33L/H90I
APLKIQAYFNETADLPCQFANSQNASLSELVVLWQDQENLVLNEVYLGKEKFDSVHSKYMGRTSFDSDSWTLRLHNLQIKDKGLYQCIIIHKKPTGMIRIHQMNSELSVLANFSQPEIVPISNITENVYINLTCSSIHGYPEPKKMSVLLRTKNSTIEYDGVMQKSQDNVTELYDVSISLSVSFPDVTSNMTIFCILETDKTRLLSSPFSIELEDPQPPPDHIP

SEQ ID NO: 238 - protein, 224 aa, synthetic construct
  REGION 1..224: note = CD86 ECD-Q25M/F33L/H90I
APLKIQAYFNETADLPCQFANSQNMSLSELVVLWQDQENLVLNEVYLGKEKFDSVHSKYMGRTSFDSDSWTLRLHNLQIKDKGLYQCIIIHKKPTGMIRIHQMNSELSVLANFSQPEIVPISNITENVYINLTCSSIHGYPEPKKMSVLLRTKNSTIEYDGVMQKSQDNVTELYDVSISLSVSFPDVTSNMTIFCILETDKTRLLSSPFSIELEDPQPPPDHIP

SEQ ID NO: 239 - protein, 224 aa, synthetic construct
  REGION 1..224: note = CD86 ECD-Q25I/F33M/H90I
APLKIQAYFNETADLPCQFANSQNISLSELVVMWQDQENLVLNEVYLGKEKFDSVHSKYMGRTSFDSDSWTLRLHNLQIKDKGLYQCIIIHKKPTGMIRIHQMNSELSVLANFSQPEIVPISNITENVYINLTCSSIHGYPEPKKMSVLLRTKNSTIEYDGVMQKSQDNVTELYDVSISLSVSFPDVTSNMTIFCILETDKTRLLSSPFSIELEDPQPPPDHIP

SEQ ID NO: 240 - protein, 224 aa, synthetic construct
  REGION 1..224: note = CD86 ECD-Q25I/F33L/I89V/H90I
APLKIQAYFNETADLPCQFANSQNISLSELVVLWQDQENLVLNEVYLGKEKFDSVHSKYMGRTSFDSDSWTLRLHNLQIKDKGLYQCIVIHKKPTGMIRIHQMNSELSVLANFSQPEIVPISNITENVYINLTCSSIHGYPEPKKMSVLLRTKNSTIEYDGVMQKSQDNVTELYDVSISLSVSFPDVTSNMTIFCILETDKTRLLSSPFSIELEDPQPPPDHIP

SEQ ID NO: 241 - protein, 224 aa, synthetic construct
  REGION 1..224: note = CD86 ECD-Q25I/F33L/I89F/H90I
APLKIQAYFNETADLPCQFANSQNISLSELVVLWQDQENLVLNEVYLGKEKFDSVHSKYMGRTSFDSDSWTLRLHNLQIKDKGLYQCIFIHKKPTGMIRIHQMNSELSVLANFSQPEIVPISNITENVYINLTCSSIHGYPEPKKMSVLLRTKNSTIEYDGVMQKSQDNVTELYDVSISLSVSFPDVTSNMTIFCILETDKTRLLSSPFSIELEDPQPPPDHIP

SEQ ID NO: 242 - protein, 224 aa, synthetic construct
  REGION 1..224: note = CD86 ECD-Q25I/F33L/I89M/H90I
APLKIQAYFNETADLPCQFANSQNISLSELVVLWQDQENLVLNEVYLGKEKFDSVHSKYMGRTSFDSDSWTLRLHNLQIKDKGLYQCIMIHKKPTGMIRIHQMNSELSVLANFSQPEIVPISNITENVYINLTCSSIHGYPEPKKMSVLLRTKNSTIEYDGVMQKSQDNVTELYDVSISLSVSFPDVTSNMTIFCILETDKTRLLSSPFSIELEDPQPPPDHIP

SEQ ID NO: 243 - protein, 224 aa, synthetic construct
  REGION 1..224: note = CD86 ECD-Q25I/F33L/H90M
APLKIQAYFNETADLPCQFANSQNISLSELVVLWQDQENLVLNEVYLGKEKFDSVHSKYMGRTSFDSDSWTLRLHNLQIKDKGLYQCIIMHKKPTGMIRIHQMNSELSVLANFSQPEIVPISNITENVYINLTCSSIHGYPEPKKMSVLLRTKNSTIEYDGVMQKSQDNVTELYDVSISLSVSFPDVTSNMTIFCILETDKTRLLSSPFSIELEDPQPPPDHIP

SEQ ID NO: 244 - protein, 26 aa, synthetic construct
  REGION 1..26: note = LAG3 97-122
RRYTVLSVGPGGLRSGRLPLQPRVQL

SEQ ID NO: 245 - protein, 33 aa, synthetic construct
  REGION 1..33: note = LAG3 97-129
RRYTVLSVGPGGLRSGRLPLQPRVQLDERGRQR

SEQ ID NO: 246 - protein, 40 aa, synthetic construct
  REGION 1..40: note = LAG3 97-136
RRYTVLSVGPGGLRSGRLPLQPRVQLDERGRQRGDFSLWL

SEQ ID NO: 247 - protein, 50 aa, synthetic construct
  REGION 1..50: note = LAG3 97-146
RRYTVLSVGPGGLRSGRLPLQPRVQLDERGRQRGDFSLWLRPARRADAGE

SEQ ID NO: 248 - protein, 60 aa, synthetic construct
  REGION 1..60: note = LAG3 97-156
RRYTVLSVGPGGLRSGRLPLQPRVQLDERGRQRGDFSLWLRPARRADAGEYRAAVHLRDR

SEQ ID NO: 249 - protein, 61 aa, synthetic construct
  REGION 1..61: note = LAG3 97-157
RRYTVLSVGPGGLRSGRLPLQPRVQLDERGRQRGDFSLWLRPARRADAGEYRAAVHLRDRA

SEQ ID NO: 250 - protein, 62 aa, synthetic construct
  REGION 1..62: note = LAG3 97-158
RRYTVLSVGPGGLRSGRLPLQPRVQLDERGRQRGDFSLWLRPARRADAGEYRAAVHLRDRAL

SEQ ID NO: 251 - protein, 63 aa, synthetic construct
  REGION 1..63: note = LAG3 97-159
RRYTVLSVGPGGLRSGRLPLQPRVQLDERGRQRGDFSLWLRPARRADAGEYRAAVHLRDRALS

SEQ ID NO: 252 - protein, 64 aa, synthetic construct
  REGION 1..64: note = LAG3 97-160
RRYTVLSVGPGGLRSGRLPLQPRVQLDERGRQRGDFSLWLRPARRADAGEYRAAVHLRDRALSC

SEQ ID NO: 253 - protein, 65 aa, synthetic construct
  REGION 1..65: note = LAG3 97-161
RRYTVLSVGPGGLRSGRLPLQPRVQLDERGRQRGDFSLWLRPARRADAGEYRAAVHLRDRALSCR

SEQ ID NO: 254 - protein, 66 aa, synthetic construct
  REGION 1..66: note = LAG3 97-162
RRYTVLSVGPGGLRSGRLPLQPRVQLDERGRQRGDFSLWLRPARRADAGEYRAAVHLRDRALSCRL

SEQ ID NO: 255 - protein, 67 aa, synthetic construct
  REGION 1..67: note = LAG3 97-163
RRYTVLSVGPGGLRSGRLPLQPRVQLDERGRQRGDFSLWLRPARRADAGEYRAAVHLRDRALSCRLR

SEQ ID NO: 256 - protein, 68 aa, synthetic construct
  REGION 1..68: note = LAG3 97-164
RRYTVLSVGPGGLRSGRLPLQPRVQLDERGRQRGDFSLWLRPARRADAGEYRAAVHLRDRALSCRLRL

SEQ ID NO: 257 - protein, 69 aa, synthetic construct
  REGION 1..69: note = LAG3 97-165
RRYTVLSVGPGGLRSGRLPLQPRVQLDERGRQRGDFSLWLRPARRADAGEYRAAVHLRDRALSCRLRLR

SEQ ID NO: 258 - protein, 70 aa, synthetic construct
  REGION 1..70: note = LAG3 97-166
RRYTVLSVGPGGLRSGRLPLQPRVQLDERGRQRGDFSLWLRPARRADAGEYRAAVHLRDRALSCRLRLRL

SEQ ID NO: 259 - protein, 71 aa, synthetic construct
  REGION 1..71: note = LAG3 97-167
RRYTVLSVGPGGLRSGRLPLQPRVQLDERGRQRGDFSLWLRPARRADAGEYRAAVHLRDRALSCRLRLRLG

SEQ ID NO: 260 - protein, 26 aa, synthetic construct
  REGION 1..26: note = LAG3 R97E 97-122
ERYTVLSVGPGGLRSGRLPLQPRVQL

SEQ ID NO: 261 - protein, 33 aa, synthetic construct
  REGION 1..33: note = LAG3 R97E 97-129
ERYTVLSVGPGGLRSGRLPLQPRVQLDERGRQR

SEQ ID NO: 262 - protein, 40 aa, synthetic construct
  REGION 1..40: note = LAG3 R97E 97-136
ERYTVLSVGPGGLRSGRLPLQPRVQLDERGRQRGDFSLWL

SEQ ID NO: 263 - protein, 50 aa, synthetic construct
  REGION 1..50: note = LAG3 R97E 97-146
ERYTVLSVGPGGLRSGRLPLQPRVQLDERGRQRGDFSLWLRPARRADAGE

SEQ ID NO: 264 - protein, 60 aa, synthetic construct
  REGION 1..60: note = LAG3 R97E 97-156
ERYTVLSVGPGGLRSGRLPLQPRVQLDERGRQRGDFSLWLRPARRADAGEYRAAVHLRDR

SEQ ID NO: 265 - protein, 61 aa, synthetic construct
  REGION 1..61: note = LAG3 R97E 97-157
ERYTVLSVGPGGLRSGRLPLQPRVQLDERGRQRGDFSLWLRPARRADAGEYRAAVHLRDRA

SEQ ID NO: 266 - protein, 62 aa, synthetic construct
  REGION 1..62: note = LAG3 R97E 97-158
ERYTVLSVGPGGLRSGRLPLQPRVQLDERGRQRGDFSLWLRPARRADAGEYRAAVHLRDRAL

SEQ ID NO: 267 - protein, 63 aa, synthetic construct
  REGION 1..63: note = LAG3 R97E 97-159
ERYTVLSVGPGGLRSGRLPLQPRVQLDERGRQRGDFSLWLRPARRADAGEYRAAVHLRDRALS

SEQ ID NO: 268 - protein, 64 aa, synthetic construct
  REGION 1..64: note = LAG3 R97E 97-160
ERYTVLSVGPGGLRSGRLPLQPRVQLDERGRQRGDFSLWLRPARRADAGEYRAAVHLRDRALSC

SEQ ID NO: 269 - protein, 65 aa, synthetic construct
  REGION 1..65: note = LAG3 R97E 97-161
ERYTVLSVGPGGLRSGRLPLQPRVQLDERGRQRGDFSLWLRPARRADAGEYRAAVHLRDRALSCR

SEQ ID NO: 270 - protein, 66 aa, synthetic construct
  REGION 1..66: note = LAG3 R97E 97-162
ERYTVLSVGPGGLRSGRLPLQPRVQLDERGRQRGDFSLWLRPARRADAGEYRAAVHLRDRALSCRL

SEQ ID NO: 271 - protein, 67 aa, synthetic construct
  REGION 1..67: note = LAG3 R97E 97-163
ERYTVLSVGPGGLRSGRLPLQPRVQLDERGRQRGDFSLWLRPARRADAGEYRAAVHLRDRALSCRLR

SEQ ID NO: 272 - protein, 68 aa, synthetic construct
  REGION 1..68: note = LAG3 R97E 97-164
ERYTVLSVGPGGLRSGRLPLQPRVQLDERGRQRGDFSLWLRPARRADAGEYRAAVHLRDRALSCRLRL

SEQ ID NO: 273 - protein, 69 aa, synthetic construct
  REGION 1..69: note = LAG3 R97E 97-165
ERYTVLSVGPGGLRSGRLPLQPRVQLDERGRQRGDFSLWLRPARRADAGEYRAAVHLRDRALSCRLRLR

SEQ ID NO: 274 - protein, 70 aa, synthetic construct
  REGION 1..70: note = LAG3 R97E 97-166
ERYTVLSVGPGGLRSGRLPLQPRVQLDERGRQRGDFSLWLRPARRADAGEYRAAVHLRDRALSCRLRLRL

SEQ ID NO: 275 - protein, 71 aa, synthetic construct
  REGION 1..71: note = LAG3 R97E 97-167
ERYTVLSVGPGGLRSGRLPLQPRVQLDERGRQRGDFSLWLRPARRADAGEYRAAVHLRDRALSCRLRLRLG

SEQ ID NO: 276 - protein, 129 aa, synthetic construct
  REGION 1..129: note = LAG3 28-156
EVPVVWAQEGAPAQLPCSPTIPLQDLSLLRRAGVTWQHQPDSGPPAAAPGHPLAPGPHPAAPSSWGPRPRRYTVLSVGPGGLRSGRLPLQPRVQLDERGRQRGDFSLWLRPARRADAGEYRAAVHLRDR

SEQ ID NO: 277 - protein, 134 aa, synthetic construct
  REGION 1..134: note = LAG3 28-161
EVPVVWAQEGAPAQLPCSPTIPLQDLSLLRRAGVTWQHQPDSGPPAAAPGHPLAPGPHPAAPSSWGPRPRRYTVLSVGPGGLRSGRLPLQPRVQLDERGRQRGDFSLWLRPARRADAGEYRAAVHLRDRALSCR

SEQ ID NO: 278 - protein, 140 aa, synthetic construct
  REGION 1..140: note = LAG3 28-167
EVPVVWAQEGAPAQLPCSPTIPLQDLSLLRRAGVTWQHQPDSGPPAAAPGHPLAPGPHPAAPSSWGPRPRRYTVLSVGPGGLRSGRLPLQPRVQLDERGRQRGDFSLWLRPARRADAGEYRAAVHLRDRALSCRLRLRLG

SEQ ID NO: 279 - protein, 129 aa, synthetic construct
  REGION 1..129: note = LAG3 R97E 28-156
EVPVVWAQEGAPAQLPCSPTIPLQDLSLLRRAGVTWQHQPDSGPPAAAPGHPLAPGPHPAAPSSWGPRPERYTVLSVGPGGLRSGRLPLQPRVQLDERGRQRGDFSLWLRPARRADAGEYRAAVHLRDR

SEQ ID NO: 280 - protein, 134 aa, synthetic construct
  REGION 1..134: note = LAG3 R97E 28-161
EVPVVWAQEGAPAQLPCSPTIPLQDLSLLRRAGVTWQHQPDSGPPAAAPGHPLAPGPHPAAPSSWGPRPERYTVLSVGPGGLRSGRLPLQPRVQLDERGRQRGDFSLWLRPARRADAGEYRAAVHLRDRALSCR

SEQ ID NO: 281 - protein, 140 aa, synthetic construct
  REGION 1..140: note = LAG3 R97E 28-167
EVPVVWAQEGAPAQLPCSPTIPLQDLSLLRRAGVTWQHQPDSGPPAAAPGHPLAPGPHPAAPSSWGPRPERYTVLSVGPGGLRSGRLPLQPRVQLDERGRQRGDFSLWLRPARRADAGEYRAAVHLRDRALSCRLRLRLG

SEQ ID NO: 282 - protein, 113 aa, synthetic construct
  REGION 1..113: note = LAG3 44-156
CSPTIPLQDLSLLRRAGVTWQHQPDSGPPAAAPGHPLAPGPHPAAPSSWGPRPRRYTVLSVGPGGLRSGRLPLQPRVQLDERGRQRGDFSLWLRPARRADAGEYRAAVHLRDR

SEQ ID NO: 283 - protein, 118 aa, synthetic construct
  REGION 1..118: note = LAG3 44-161
CSPTIPLQDLSLLRRAGVTWQHQPDSGPPAAAPGHPLAPGPHPAAPSSWGPRPRRYTVLSVGPGGLRSGRLPLQPRVQLDERGRQRGDFSLWLRPARRADAGEYRAAVHLRDRALSCR

SEQ ID NO: 284 - protein, 124 aa, synthetic construct
  REGION 1..124: note = LAG3 44-167
CSPTIPLQDLSLLRRAGVTWQHQPDSGPPAAAPGHPLAPGPHPAAPSSWGPRPRRYTVLSVGPGGLRSGRLPLQPRVQLDERGRQRGDFSLWLRPARRADAGEYRAAVHLRDRALSCRLRLRLG

SEQ ID NO: 285 - protein, 113 aa, synthetic construct
  REGION 1..113: note = LAG3 R97E 44-156
CSPTIPLQDLSLLRRAGVTWQHQPDSGPPAAAPGHPLAPGPHPAAPSSWGPRPERYTVLSVGPGGLRSGRLPLQPRVQLDERGRQRGDFSLWLRPARRADAGEYRAAVHLRDR

SEQ ID NO: 286 - protein, 118 aa, synthetic construct
  REGION 1..118: note = LAG3 R97E 44-161
CSPTIPLQDLSLLRRAGVTWQHQPDSGPPAAAPGHPLAPGPHPAAPSSWGPRPERYTVLSVGPGGLRSGRLPLQPRVQLDERGRQRGDFSLWLRPARRADAGEYRAAVHLRDRALSCR

SEQ ID NO: 287 - protein, 124 aa, synthetic construct
  REGION 1..124: note = LAG3 R97E 44-167
CSPTIPLQDLSLLRRAGVTWQHQPDSGPPAAAPGHPLAPGPHPAAPSSWGPRPERYTVLSVGPGGLRSGRLPLQPRVQLDERGRQRGDFSLWLRPARRADAGEYRAAVHLRDRALSCRLRLRLG

SEQ ID NO: 288 - protein, 97 aa, synthetic construct
  REGION 1..97: note = LAG3 60-156
GVTWQHQPDSGPPAAAPGHPLAPGPHPAAPSSWGPRPRRYTVLSVGPGGLRSGRLPLQPRVQLDERGRQRGDFSLWLRPARRADAGEYRAAVHLRDR

SEQ ID NO: 289 - protein, 102 aa, synthetic construct
  REGION 1..102: note = LAG3 60-161
GVTWQHQPDSGPPAAAPGHPLAPGPHPAAPSSWGPRPRRYTVLSVGPGGLRSGRLPLQPRVQLDERGRQRGDFSLWLRPARRADAGEYRAAVHLRDRALSCR

SEQ ID NO: 290 - protein, 108 aa, synthetic construct
  REGION 1..108: note = LAG3 60-167
GVTWQHQPDSGPPAAAPGHPLAPGPHPAAPSSWGPRPRRYTVLSVGPGGLRSGRLPLQPRVQLDERGRQRGDFSLWLRPARRADAGEYRAAVHLRDRALSCRLRLRLG

SEQ ID NO: 291 - protein, 97 aa, synthetic construct
  REGION 1..97: note = LAG3 R97E 60-156
GVTWQHQPDSGPPAAAPGHPLAPGPHPAAPSSWGPRPERYTVLSVGPGGLRSGRLPLQPRVQLDERGRQRGDFSLWLRPARRADAGEYRAAVHLRDR

SEQ ID NO: 292 - protein, 102 aa, synthetic construct
  REGION 1..102: note = LAG3 R97E 60-161
GVTWQHQPDSGPPAAAPGHPLAPGPHPAAPSSWGPRPERYTVLSVGPGGLRSGRLPLQPRVQLDERGRQRGDFSLWLRPARRADAGEYRAAVHLRDRALSCR

SEQ ID NO: 293 - protein, 108 aa, synthetic construct
  REGION 1..108: note = LAG3 R97E 60-167
GVTWQHQPDSGPPAAAPGHPLAPGPHPAAPSSWGPRPERYTVLSVGPGGLRSGRLPLQPRVQLDERGRQRGDFSLWLRPARRADAGEYRAAVHLRDRALSCRLRLRLG

SEQ ID NO: 294 - protein, 89 aa, synthetic construct
  REGION 1..89: note = LAG3 68-156
DSGPPAAAPGHPLAPGPHPAAPSSWGPRPRRYTVLSVGPGGLRSGRLPLQPRVQLDERGRQRGDFSLWLRPARRADAGEYRAAVHLRDR

SEQ ID NO: 295 - protein, 94 aa, synthetic construct
  REGION 1..94: note = LAG3 68-161
DSGPPAAAPGHPLAPGPHPAAPSSWGPRPRRYTVLSVGPGGLRSGRLPLQPRVQLDERGRQRGDFSLWLRPARRADAGEYRAAVHLRDRALSCR

SEQ ID NO: 296 - protein, 100 aa, synthetic construct
  REGION 1..100: note = LAG3 68-167
DSGPPAAAPGHPLAPGPHPAAPSSWGPRPRRYTVLSVGPGGLRSGRLPLQPRVQLDERGRQRGDFSLWLRPARRADAGEYRAAVHLRDRALSCRLRLRLG

SEQ ID NO: 297 - protein, 89 aa, synthetic construct
  REGION 1..89: note = LAG3 R97E 68-156
DSGPPAAAPGHPLAPGPHPAAPSSWGPRPERYTVLSVGPGGLRSGRLPLQPRVQLDERGRQRGDFSLWLRPARRADAGEYRAAVHLRDR

SEQ ID NO: 298 - protein, 94 aa, synthetic construct
  REGION 1..94: note = LAG3 R97E 68-161
DSGPPAAAPGHPLAPGPHPAAPSSWGPRPERYTVLSVGPGGLRSGRLPLQPRVQLDERGRQRGDFSLWLRPARRADAGEYRAAVHLRDRALSCR

SEQ ID NO: 299 - protein, 100 aa, synthetic construct
  REGION 1..100: note = LAG3 R97E 68-167
DSGPPAAAPGHPLAPGPHPAAPSSWGPRPERYTVLSVGPGGLRSGRLPLQPRVQLDERGRQRGDFSLWLRPARRADAGEYRAAVHLRDRALSCRLRLRLG

SEQ ID NO: 300 - protein, 74 aa, synthetic construct
  REGION 1..74: note = LAG3 83-156
GPHPAAPSSWGPRPRRYTVLSVGPGGLRSGRLPLQPRVQLDERGRQRGDFSLWLRPARRADAGEYRAAVHLRDR

SEQ ID NO: 301 - protein, 79 aa, synthetic construct
  REGION 1..79: note = LAG3 83-161
GPHPAAPSSWGPRPRRYTVLSVGPGGLRSGRLPLQPRVQLDERGRQRGDFSLWLRPARRADAGEYRAAVHLRDRALSCR

SEQ ID NO: 302 - protein, 85 aa, synthetic construct
  REGION 1..85: note = LAG3 83-167
GPHPAAPSSWGPRPRRYTVLSVGPGGLRSGRLPLQPRVQLDERGRQRGDFSLWLRPARRADAGEYRAAVHLRDRALSCRLRLRLG

SEQ ID NO: 303 - protein, 74 aa, synthetic construct
  REGION 1..74: note = LAG3 R97E 83-156
GPHPAAPSSWGPRPERYTVLSVGPGGLRSGRLPLQPRVQLDERGRQRGDFSLWLRPARRADAGEYRAAVHLRDR

SEQ ID NO: 304 - protein, 79 aa, synthetic construct
  REGION 1..79: note = LAG3 R97E 83-161
GPHPAAPSSWGPRPERYTVLSVGPGGLRSGRLPLQPRVQLDERGRQRGDFSLWLRPARRADAGEYRAAVHLRDRALSCR

SEQ ID NO: 305 - protein, 85 aa, synthetic construct
  REGION 1..85: note = LAG3 R97E 83-167
GPHPAAPSSWGPRPERYTVLSVGPGGLRSGRLPLQPRVQLDERGRQRGDFSLWLRPARRADAGEYRAAVHLRDRALSCRLRLRLG

SEQ ID NO: 306 - protein, 63 aa, synthetic construct
  REGION 1..63: note = LAG3 94-156
PRPRRYTVLSVGPGGLRSGRLPLQPRVQLDERGRQRGDFSLWLRPARRADAGEYRAAVHLRDR

SEQ ID NO: 307 - protein, 68 aa, synthetic construct
  REGION 1..68: note = LAG3 94-161
PRPRRYTVLSVGPGGLRSGRLPLQPRVQLDERGRQRGDFSLWLRPARRADAGEYRAAVHLRDRALSCR

SEQ ID NO: 308 - protein, 74 aa, synthetic construct
  REGION 1..74: note = LAG3 94-167
PRPRRYTVLSVGPGGLRSGRLPLQPRVQLDERGRQRGDFSLWLRPARRADAGEYRAAVHLRDRALSCRLRLRLG

SEQ ID NO: 309 - protein, 63 aa, synthetic construct
  REGION 1..63: note = LAG3 R97E 94-156
PRPERYTVLSVGPGGLRSGRLPLQPRVQLDERGRQRGDFSLWLRPARRADAGEYRAAVHLRDR

SEQ ID NO: 310 - protein, 68 aa, synthetic construct
  REGION 1..68: note = LAG3 R97E 94-161
PRPERYTVLSVGPGGLRSGRLPLQPRVQLDERGRQRGDFSLWLRPARRADAGEYRAAVHLRDRALSCR

SEQ ID NO: 311 - protein, 74 aa, synthetic construct
  REGION 1..74: note = LAG3 R97E 94-167
PRPERYTVLSVGPGGLRSGRLPLQPRVQLDERGRQRGDFSLWLRPARRADAGEYRAAVHLRDRALSCRLRLRLG

SEQ ID NO: 312 - protein, 55 aa, synthetic construct
  REGION 1..55: note = LAG3 102-156
LSVGPGGLRSGRLPLQPRVQLDERGRQRGDFSLWLRPARRADAGEYRAAVHLRDR

SEQ ID NO: 313 - protein, 60 aa, synthetic construct
  REGION 1..60: note = LAG3 102-161
LSVGPGGLRSGRLPLQPRVQLDERGRQRGDFSLWLRPARRADAGEYRAAVHLRDRALSCR

SEQ ID NO: 314 - protein, 66 aa, synthetic construct
  REGION 1..66: note = LAG3 102-167
LSVGPGGLRSGRLPLQPRVQLDERGRQRGDFSLWLRPARRADAGEYRAAVHLRDRALSCRLRLRLG

SEQ ID NO: 315 - protein, 50 aa, synthetic construct
  REGION 1..50: note = LAG3 107-156
GGLRSGRLPLQPRVQLDERGRQRGDFSLWLRPARRADAGEYRAAVHLRDR

SEQ ID NO: 316 - protein, 55 aa, synthetic construct
  REGION 1..55: note = LAG3 107-161
GGLRSGRLPLQPRVQLDERGRQRGDFSLWLRPARRADAGEYRAAVHLRDRALSCR

SEQ ID NO: 317 - protein, 61 aa, synthetic construct
  REGION 1..61: note = LAG3 107-167
GGLRSGRLPLQPRVQLDERGRQRGDFSLWLRPARRADAGEYRAAVHLRDRALSCRLRLRLG

SEQ ID NO: 318 - protein, 45 aa, synthetic construct
  REGION 1..45: note = LAG3 112-156
GRLPLQPRVQLDERGRQRGDFSLWLRPARRADAGEYRAAVHLRDR

SEQ ID NO: 319 - protein, 50 aa, synthetic construct
  REGION 1..50: note = LAG3 112-161
GRLPLQPRVQLDERGRQRGDFSLWLRPARRADAGEYRAAVHLRDRALSCR

SEQ ID NO: 320 - protein, 56 aa, synthetic construct
  REGION 1..56: note = LAG3 112-167
GRLPLQPRVQLDERGRQRGDFSLWLRPARRADAGEYRAAVHLRDRALSCRLRLRLG

SEQ ID NO: 321 - protein, 40 aa, synthetic construct
  REGION 1..40: note = LAG3 117-156
QPRVQLDERGRQRGDFSLWLRPARRADAGEYRAAVHLRDR

SEQ ID NO: 322 - protein, 45 aa, synthetic construct
  REGION 1..45: note = LAG3 117-161
QPRVQLDERGRQRGDFSLWLRPARRADAGEYRAAVHLRDRALSCR

SEQ ID NO: 323 - protein, 51 aa, synthetic construct
  REGION 1..51: note = LAG3 117-167
QPRVQLDERGRQRGDFSLWLRPARRADAGEYRAAVHLRDRALSCRLRLRLG

SEQ ID NO: 324 - protein, 35 aa, synthetic construct
  REGION 1..35: note = LAG3 122-156
LDERGRQRGDFSLWLRPARRADAGEYRAAVHLRDR

SEQ ID NO: 325 - protein, 40 aa, synthetic construct
  REGION 1..40: note = LAG3 122-161
LDERGRQRGDFSLWLRPARRADAGEYRAAVHLRDRALSCR

SEQ ID NO: 326 - protein, 46 aa, synthetic construct
  REGION 1..46: note = LAG3 122-167
LDERGRQRGDFSLWLRPARRADAGEYRAAVHLRDRALSCRLRLRLG

SEQ ID NO: 327 - protein, 30 aa, synthetic construct
  REGION 1..30: note = LAG3 127-156
RQRGDFSLWLRPARRADAGEYRAAVHLRDR

SEQ ID NO: 328 - protein, 35 aa, synthetic construct
  REGION 1..35: note = LAG3 127-161
RQRGDFSLWLRPARRADAGEYRAAVHLRDRALSCR

SEQ ID NO: 329 - protein, 41 aa, synthetic construct
  REGION 1..41: note = LAG3 127-167
RQRGDFSLWLRPARRADAGEYRAAVHLRDRALSCRLRLRLG

SEQ ID NO: 330 - protein, 25 aa, synthetic construct
  REGION 1..25: note = LAG3 132-156
FSLWLRPARRADAGEYRAAVHLRDR

SEQ ID NO: 331 - protein, 30 aa, synthetic construct
  REGION 1..30: note = LAG3 132-161
FSLWLRPARRADAGEYRAAVHLRDRALSCR

SEQ ID NO: 332 - protein, 36 aa, synthetic construct
  REGION 1..36: note = LAG3 132-167
FSLWLRPARRADAGEYRAAVHLRDRALSCRLRLRLG

SEQ ID NO: 333 - protein, 20 aa, synthetic construct
  REGION 1..20: note = LAG3 137-156
RPARRADAGEYRAAVHLRDR

SEQ ID NO: 334 - protein, 25 aa, synthetic construct
  REGION 1..25: note = LAG3 137-161
RPARRADAGEYRAAVHLRDRALSCR

SEQ ID NO: 335 - protein, 31 aa, synthetic construct
  REGION 1..31: note = LAG3 137-167
RPARRADAGEYRAAVHLRDRALSCRLRLRLG

SEQ ID NO: 336 - protein, 100 aa, synthetic construct
  REGION 1..100: note = LAG3 23-122
LQPGAEVPVVWAQEGAPAQLPCSPTIPLQDLSLLRRAGVTWQHQPDSGPPAAAPGHPLAPGPHPAAPSSWGPRPRRYTVLSVGPGGLRSGRLPLQPRVQL

SEQ ID NO: 337 - protein, 107 aa, synthetic construct
  REGION 1..107: note = LAG3 23-129
LQPGAEVPVVWAQEGAPAQLPCSPTIPLQDLSLLRRAGVTWQHQPDSGPPAAAPGHPLAPGPHPAAPSSWGPRPRRYTVLSVGPGGLRSGRLPLQPRVQLDERGRQR

SEQ ID NO: 338 - protein, 113 aa, synthetic construct
  REGION 1..113: note = LAG3 23-136
LQPGAEVPVVWAQEGAPAQLPCSPTIPLQDLSLLRRAGVTWQHQPDSGPPAAAPGHPLAPGPHPAAPSSWGPRPRRYTVLSVGPGGLRSGRLPLQPRVQLDERGRQRGDFSLW

SEQ ID NO: 339 - protein, 124 aa, synthetic construct
  REGION 1..124: note = LAG3 23-146
LQPGAEVPVVWAQEGAPAQLPCSPTIPLQDLSLLRRAGVTWQHQPDSGPPAAAPGHPLAPGPHPAAPSSWGPRPRRYTVLSVGPGGLRSGRLPLQPRVQLDERGRQRGDFSLWLRPARRADAGE

SEQ ID NO: 340 - protein, 134 aa, synthetic construct
  REGION 1..134: note = LAG3 23-156
LQPGAEVPVVWAQEGAPAQLPCSPTIPLQDLSLLRRAGVTWQHQPDSGPPAAAPGHPLAPGPHPAAPSSWGPRPRRYTVLSVGPGGLRSGRLPLQPRVQLDERGRQRGDFSLWLRPARRADAGEYRAAVHLRDR

SEQ ID NO: 341 - protein, 139 aa, synthetic construct
  REGION 1..139: note = LAG3 23-161
LQPGAEVPVVWAQEGAPAQLPCSPTIPLQDLSLLRRAGVTWQHQPDSGPPAAAPGHPLAPGPHPAAPSSWGPRPRRYTVLSVGPGGLRSGRLPLQPRVQLDERGRQRGDFSLWLRPARRADAGEYRAAVHLRDRALSCR

SEQ ID NO: 342 - protein, 145 aa, synthetic construct
  REGION 1..145: note = LAG3 23-167
LQPGAEVPVVWAQEGAPAQLPCSPTIPLQDLSLLRRAGVTWQHQPDSGPPAAAPGHPLAPGPHPAAPSSWGPRPRRYTVLSVGPGGLRSGRLPLQPRVQLDERGRQRGDFSLWLRPARRADAGEYRAAVHLRDRALSCRLRLRLG

SEQ ID NO: 343 - protein, 100 aa, synthetic construct
  REGION 1..100: note = LAG3 R97E 23-122
LQPGAEVPVVWAQEGAPAQLPCSPTIPLQDLSLLRRAGVTWQHQPDSGPPAAAPGHPLAPGPHPAAPSSWGPRPERYTVLSVGPGGLRSGRLPLQPRVQL

SEQ ID NO: 344 - protein, 107 aa, synthetic construct
  REGION 1..107: note = LAG3 R97E 23-129
LQPGAEVPVVWAQEGAPAQLPCSPTIPLQDLSLLRRAGVTWQHQPDSGPPAAAPGHPLAPGPHPAAPSSWGPRPERYTVLSVGPGGLRSGRLPLQPRVQLDERGRQR

SEQ ID NO: 345 - protein, 113 aa, synthetic construct
  REGION 1..113: note = LAG3 R97E 23-136
LQPGAEVPVVWAQEGAPAQLPCSPTIPLQDLSLLRRAGVTWQHQPDSGPPAAAPGHPLAPGPHPAAPSSWGPRPERYTVLSVGPGGLRSGRLPLQPRVQLDERGRQRGDFSLW

SEQ ID NO: 346 - protein, 124 aa, synthetic construct
  REGION 1..124: note = LAG3 R97E 23-146
LQPGAEVPVVWAQEGAPAQLPCSPTIPLQDLSLLRRAGVTWQHQPDSGPPAAAPGHPLAPGPHPAAPSSWGPRPERYTVLSVGPGGLRSGRLPLQPRVQLDERGRQRGDFSLWLRPARRADAGE

SEQ ID NO: 347 - protein, 134 aa, synthetic construct
  REGION 1..134: note = LAG3 R97E 23-156
LQPGAEVPVVWAQEGAPAQLPCSPTIPLQDLSLLRRAGVTWQHQPDSGPPAAAPGHPLAPGPHPAAPSSWGPRPERYTVLSVGPGGLRSGRLPLQPRVQLDERGRQRGDFSLWLRPARRADAGEYRAAVHLRDR

SEQ ID NO: 348 - protein, 139 aa, synthetic construct
  REGION 1..139: note = LAG3 R97E 23-161
LQPGAEVPVVWAQEGAPAQLPCSPTIPLQDLSLLRRAGVTWQHQPDSGPPAAAPGHPLAPGPHPAAPSSWGPRPERYTVLSVGPGGLRSGRLPLQPRVQLDERGRQRGDFSLWLRPARRADAGEYRAAVHLRDRALSCR

SEQ ID NO: 349 - protein, 145 aa, synthetic construct
  REGION 1..145: note = LAG3 R97E 23-167
LQPGAEVPVVWAQEGAPAQLPCSPTIPLQDLSLLRRAGVTWQHQPDSGPPAAAPGHPLAPGPHPAAPSSWGPRPERYTVLSVGPGGLRSGRLPLQPRVQLDERGRQRGDFSLWLRPARRADAGEYRAAVHLRDRALSCRLRLRLG

SEQ ID NO: 350 - protein, 453 aa, synthetic construct
  REGION 1..453: note = CD86 ECD-Q25I/F33L/H90I-IgG4 Fc
APLKIQAYFNETADLPCQFANSQNISLSELVVLWQDQENLVLNEVYLGKEKFDSVHSKYMGRTSFDSDSWTLRLHNLQIKDKGLYQCIIIHKKPTGMIRIHQMNSELSVLANFSQPEIVPISNITENVYINLTCSSIHGYPEPKKMSVLLRTKNSTIEYDGVMQKSQDNVTELYDVSISLSVSFPDVTSNMTIFCILETDKTRLLSSPFSIELEDPQPPPDHIPESKYGPPCPSCPAPEFLGGPSVFLFPPKPKDTLMISRTPEVTCVVVDVSQEDPEVQFNWYVDGVEVHNAKTKPREEQFNSTYRVVSVLTVLHQDWLNGKEYKCKVSNKGLPSSIEKTISKAKGQPREPQVYTLPPSQEEMTKNQVSLTCLVKGFYPSDIAVEWESNGQPENNYKTTPPVLDSDGSFFLYSRLTVDKSRWQEGNVFSCSVMHEALHNHYTQKSLSLSLGK

SEQ ID NO: 351 - protein, 453 aa, synthetic construct
  REGION 1..453: note = CD86 ECD-Q25V/F33L/H90I-IgG4 Fc
APLKIQAYFNETADLPCQFANSQNVSLSELVVLWQDQENLVLNEVYLGKEKFDSVHSKYMGRTSFDSDSWTLRLHNLQIKDKGLYQCIIIHKKPTGMIRIHQMNSELSVLANFSQPEIVPISNITENVYINLTCSSIHGYPEPKKMSVLLRTKNSTIEYDGVMQKSQDNVTELYDVSISLSVSFPDVTSNMTIFCILETDKTRLLSSPFSIELEDPQPPPDHIPESKYGPPCPSCPAPEFLGGPSVFLFPPKPKDTLMISRTPEVTCVVVDVSQEDPEVQFNWYVDGVEVHNAKTKPREEQFNSTYRVVSVLTVLHQDWLNGKEYKCKVSNKGLPSSIEKTISKAKGQPREPQVYTLPPSQEEMTKNQVSLTCLVKGFYPSDIAVEWESNGQPENNYKTTPPVLDSDGSFFLYSRLTVDKSRWQEGNVFSCSVMHEALHNHYTQKSLSLSLGK

SEQ ID NO: 352 - protein, 453 aa, synthetic construct
  REGION 1..453: note = CD86 ECD-Q25I/F33V/H90I-IgG4 Fc
APLKIQAYFNETADLPCQFANSQNISLSELVVVWQDQENLVLNEVYLGKEKFDSVHSKYMGRTSFDSDSWTLRLHNLQIKDKGLYQCIIIHKKPTGMIRIHQMNSELSVLANFSQPEIVPISNITENVYINLTCSSIHGYPEPKKMSVLLRTKNSTIEYDGVMQKSQDNVTELYDVSISLSVSFPDVTSNMTIFCILETDKTRLLSSPFSIELEDPQPPPDHIPESKYGPPCPSCPAPEFLGGPSVFLFPPKPKDTLMISRTPEVTCVVVDVSQEDPEVQFNWYVDGVEVHNAKTKPREEQFNSTYRVVSVLTVLHQDWLNGKEYKCKVSNKGLPSSIEKTISKAKGQPREPQVYTLPPSQEEMTKNQVSLTCLVKGFYPSDIAVEWESNGQPENNYKTTPPVLDSDGSFFLYSRLTVDKSRWQEGNVFSCSVMHEALHNHYTQKSLSLSLGK

SEQ ID NO: 353 - protein, 453 aa, synthetic construct
  REGION 1..453: note = CD86 ECD-Q25V/F33V/H90I-IgG4 Fc
APLKIQAYFNETADLPCQFANSQNVSLSELVVVWQDQENLVLNEVYLGKEKFDSVHSKYMGRTSFDSDSWTLRLHNLQIKDKGLYQCIIIHKKPTGMIRIHQMNSELSVLANFSQPEIVPISNITENVYINLTCSSIHGYPEPKKMSVLLRTKNSTIEYDGVMQKSQDNVTELYDVSISLSVSFPDVTSNMTIFCILETDKTRLLSSPFSIELEDPQPPPDHIPESKYGPPCPSCPAPEFLGGPSVFLFPPKPKDTLMISRTPEVTCVVVDVSQEDPEVQFNWYVDGVEVHNAKTKPREEQFNSTYRVVSVLTVLHQDWLNGKEYKCKVSNKGLPSSIEKTISKAKGQPREPQVYTLPPSQEEMTKNQVSLTCLVKGFYPSDIAVEWESNGQPENNYKTTPPVLDSDGSFFLYSRLTVDKSRWQEGNVFSCSVMHEALHNHYTQKSLSLSLGK

SEQ ID NO: 354 - protein, 453 aa, synthetic construct
  REGION 1..453: note = CD86 ECD-Q25I/F33L/H90V-IgG4 Fc
APLKIQAYFNETADLPCQFANSQNISLSELVVLWQDQENLVLNEVYLGKEKFDSVHSKYMGRTSFDSDSWTLRLHNLQIKDKGLYQCIIVHKKPTGMIRIHQMNSELSVLANFSQPEIVPISNITENVYINLTCSSIHGYPEPKKMSVLLRTKNSTIEYDGVMQKSQDNVTELYDVSISLSVSFPDVTSNMTIFCILETDKTRLLSSPFSIELEDPQPPPDHIPESKYGPPCPSCPAPEFLGGPSVFLFPPKPKDTLMISRTPEVTCVVVDVSQEDPEVQFNWYVDGVEVHNAKTKPREEQFNSTYRVVSVLTVLHQDWLNGKEYKCKVSNKGLPSSIEKTISKAKGQPREPQVYTLPPSQEEMTKNQVSLTCLVKGFYPSDIAVEWESNGQPENNYKTTPPVLDSDGSFFLYSRLTVDKSRWQEGNVFSCSVMHEALHNHYTQKSLSLSLGK

SEQ ID NO: 355 - protein, 453 aa, synthetic construct
  REGION 1..453: note = CD86 ECD-Q25V/F33L/H90V-IgG4 Fc
APLKIQAYFNETADLPCQFANSQNVSLSELVVLWQDQENLVLNEVYLGKEKFDSVHSKYMGRTSFDSDSWTLRLHNLQIKDKGLYQCIIVHKKPTGMIRIHQMNSELSVLANFSQPEIVPISNITENVYINLTCSSIHGYPEPKKMSVLLRTKNSTIEYDGVMQKSQDNVTELYDVSISLSVSFPDVTSNMTIFCILETDKTRLLSSPFSIELEDPQPPPDHIPESKYGPPCPSCPAPEFLGGPSVFLFPPKPKDTLMISRTPEVTCVVVDVSQEDPEVQFNWYVDGVEVHNAKTKPREEQFNSTYRVVSVLTVLHQDWLNGKEYKCKVSNKGLPSSIEKTISKAKGQPREPQVYTLPPSQEEMTKNQVSLTCLVKGFYPSDIAVEWESNGQPENNYKTTPPVLDSDGSFFLYSRLTVDKSRWQEGNVFSCSVMHEALHNHYTQKSLSLSLGK

SEQ ID NO: 356 - protein, 453 aa, synthetic construct
  REGION 1..453: note = CD86 ECD-Q25I/F33V/H90V-IgG4 Fc
APLKIQAYFNETADLPCQFANSQNISLSELVVVWQDQENLVLNEVYLGKEKFDSVHSKYMGRTSFDSDSWTLRLHNLQIKDKGLYQCIIVHKKPTGMIRIHQMNSELSVLANFSQPEIVPISNITENVYINLTCSSIHGYPEPKKMSVLLRTKNSTIEYDGVMQKSQDNVTELYDVSISLSVSFPDVTSNMTIFCILETDKTRLLSSPFSIELEDPQPPPDHIPESKYGPPCPSCPAPEFLGGPSVFLFPPKPKDTLMISRTPEVTCVVVDVSQEDPEVQFNWYVDGVEVHNAKTKPREEQFNSTYRVVSVLTVLHQDWLNGKEYKCKVSNKGLPSSIEKTISKAKGQPREPQVYTLPPSQEEMTKNQVSLTCLVKGFYPSDIAVEWESNGQPENNYKTTPPVLDSDGSFFLYSRLTVDKSRWQEGNVFSCSVMHEALHNHYTQKSLSLSLGK

SEQ ID NO: 357 - protein, 453 aa, synthetic construct
  REGION 1..453: note = CD86 ECD-Q25V/F33V/H90V-IgG4 Fc
APLKIQAYFNETADLPCQFANSQNVSLSELVVVWQDQENLVLNEVYLGKEKFDSVHSKYMGRTSFDSDSWTLRLHNLQIKDKGLYQCIIVHKKPTGMIRIHQMNSELSVLANFSQPEIVPISNITENVYINLTCSSIHGYPEPKKMSVLLRTKNSTIEYDGVMQKSQDNVTELYDVSISLSVSFPDVTSNMTIFCILETDKTRLLSSPFSIELEDPQPPPDHIPESKYGPPCPSCPAPEFLGGPSVFLFPPKPKDTLMISRTPEVTCVVVDVSQEDPEVQFNWYVDGVEVHNAKTKPREEQFNSTYRVVSVLTVLHQDWLNGKEYKCKVSNKGLPSSIEKTISKAKGQPREPQVYTLPPSQEEMTKNQVSLTCLVKGFYPSDIAVEWESNGQPENNYKTTPPVLDSDGSFFLYSRLTVDKSRWQEGNVFSCSVMHEALHNHYTQKSLSLSLGK

SEQ ID NO: 358 - protein, 453 aa, synthetic construct
  REGION 1..453: note = CD86 ECD-A13L/Q25I/F33L/H90I-IgG4 Fc
APLKIQAYFNETLDLPCQFANSQNISLSELVVLWQDQENLVLNEVYLGKEKFDSVHSKYMGRTSFDSDSWTLRLHNLQIKDKGLYQCIIIHKKPTGMIRIHQMNSELSVLANFSQPEIVPISNITENVYINLTCSSIHGYPEPKKMSVLLRTKNSTIEYDGVMQKSQDNVTELYDVSISLSVSFPDVTSNMTIFCILETDKTRLLSSPFSIELEDPQPPPDHIPESKYGPPCPSCPAPEFLGGPSVFLFPPKPKDTLMISRTPEVTCVVVDVSQEDPEVQFNWYVDGVEVHNAKTKPREEQFNSTYRVVSVLTVLHQDWLNGKEYKCKVSNKGLPSSIEKTISKAKGQPREPQVYTLPPSQEEMTKNQVSLTCLVKGFYPSDIAVEWESNGQPENNYKTTPPVLDSDGSFFLYSRLTVDKSRWQEGNVFSCSVMHEALHNHYTQKSLSLSLGK

SEQ ID NO: 359 - protein, 453 aa, synthetic construct
  REGION 1..453: note = CD86 ECD-A13I/Q25I/F33L/H90I-IgG4 Fc
APLKIQAYFNETIDLPCQFANSQNISLSELVVLWQDQENLVLNEVYLGKEKFDSVHSKYMGRTSFDSDSWTLRLHNLQIKDKGLYQCIIIHKKPTGMIRIHQMNSELSVLANFSQPEIVPISNITENVYINLTCSSIHGYPEPKKMSVLLRTKNSTIEYDGVMQKSQDNVTELYDVSISLSVSFPDVTSNMTIFCILETDKTRLLSSPFSIELEDPQPPPDHIPESKYGPPCPSCPAPEFLGGPSVFLFPPKPKDTLMISRTPEVTCVVVDVSQEDPEVQFNWYVDGVEVHNAKTKPREEQFNSTYRVVSVLTVLHQDWLNGKEYKCKVSNKGLPSSIEKTISKAKGQPREPQVYTLPPSQEEMTKNQVSLTCLVKGFYPSDIAVEWESNGQPENNYKTTPPVLDSDGSFFLYSRLTVDKSRWQEGNVFSCSVMHEALHNHYTQKSLSLSLGK

SEQ ID NO: 360 - protein, 453 aa, synthetic construct
  REGION 1..453: note = CD86 ECD-A13L/Q25V/F33L/H90I-IgG4 Fc
APLKIQAYFNETLDLPCQFANSQNVSLSELVVLWQDQENLVLNEVYLGKEKFDSVHSKYMGRTSFDSDSWTLRLHNLQIKDKGLYQCIIIHKKPTGMIRIHQMNSELSVLANFSQPEIVPISNITENVYINLTCSSIHGYPEPKKMSVLLRTKNSTIEYDGVMQKSQDNVTELYDVSISLSVSFPDVTSNMTIFCILETDKTRLLSSPFSIELEDPQPPPDHIPESKYGPPCPSCPAPEFLGGPSVFLFPPKPKDTLMISRTPEVTCVVVDVSQEDPEVQFNWYVDGVEVHNAKTKPREEQFNSTYRVVSVLTVLHQDWLNGKEYKCKVSNKGLPSSIEKTISKAKGQPREPQVYTLPPSQEEMTKNQVSLTCLVKGFYPSDIAVEWESNGQPENNYKTTPPVLDSDGSFFLYSRLTVDKSRWQEGNVFSCSVMHEALHNHYTQKSLSLSLGK

SEQ ID NO: 361 - protein, 453 aa, synthetic construct
  REGION 1..453: note = CD86 ECD-A13I/Q25V/F33L/H90I-IgG4 Fc
APLKIQAYFNETIDLPCQFANSQNVSLSELVVLWQDQENLVLNEVYLGKEKFDSVHSKYMGRTSFDSDSWTLRLHNLQIKDKGLYQCIIIHKKPTGMIRIHQMNSELSVLANFSQPEIVPISNITENVYINLTCSSIHGYPEPKKMSVLLRTKNSTIEYDGVMQKSQDNVTELYDVSISLSVSFPDVTSNMTIFCILETDKTRLLSSPFSIELEDPQPPPDHIPESKYGPPCPSCPAPEFLGGPSVFLFPPKPKDTLMISRTPEVTCVVVDVSQEDPEVQFNWYVDGVEVHNAKTKPREEQFNSTYRVVSVLTVLHQDWLNGKEYKCKVSNKGLPSSIEKTISKAKGQPREPQVYTLPPSQEEMTKNQVSLTCLVKGFYPSDIAVEWESNGQPENNYKTTPPVLDSDGSFFLYSRLTVDKSRWQEGNVFSCSVMHEALHNHYTQKSLSLSLGK

SEQ ID NO: 362 - protein, 453 aa, synthetic construct
  REGION 1..453: note = CD86 ECD-Q25I/F33L/I89L/H90I-IgG4 Fc
APLKIQAYFNETADLPCQFANSQNISLSELVVLWQDQENLVLNEVYLGKEKFDSVHSKYMGRTSFDSDSWTLRLHNLQIKDKGLYQCILIHKKPTGMIRIHQMNSELSVLANFSQPEIVPISNITENVYINLTCSSIHGYPEPKKMSVLLRTKNSTIEYDGVMQKSQDNVTELYDVSISLSVSFPDVTSNMTIFCILETDKTRLLSSPFSIELEDPQPPPDHIPESKYGPPCPSCPAPEFLGGPSVFLFPPKPKDTLMISRTPEVTCVVVDVSQEDPEVQFNWYVDGVEVHNAKTKPREEQFNSTYRVVSVLTVLHQDWLNGKEYKCKVSNKGLPSSIEKTISKAKGQPREPQVYTLPPSQEEMTKNQVSLTCLVKGFYPSDIAVEWESNGQPENNYKTTPPVLDSDGSFFLYSRLTVDKSRWQEGNVFSCSVMHEALHNHYTQKSLSLSLGK

SEQ ID NO: 363 - protein, 453 aa, synthetic construct
  REGION 1..453: note = CD86 ECD-Q25I/F33L/M60R/H90I-IgG4 Fc
APLKIQAYFNETADLPCQFANSQNISLSELVVLWQDQENLVLNEVYLGKEKFDSVHSKYRGRTSFDSDSWTLRLHNLQIKDKGLYQCIIIHKKPTGMIRIHQMNSELSVLANFSQPEIVPISNITENVYINLTCSSIHGYPEPKKMSVLLRTKNSTIEYDGVMQKSQDNVTELYDVSISLSVSFPDVTSNMTIFCILETDKTRLLSSPFSIELEDPQPPPDHIPESKYGPPCPSCPAPEFLGGPSVFLFPPKPKDTLMISRTPEVTCVVVDVSQEDPEVQFNWYVDGVEVHNAKTKPREEQFNSTYRVVSVLTVLHQDWLNGKEYKCKVSNKGLPSSIEKTISKAKGQPREPQVYTLPPSQEEMTKNQVSLTCLVKGFYPSDIAVEWESNGQPENNYKTTPPVLDSDGSFFLYSRLTVDKSRWQEGNVFSCSVMHEALHNHYTQKSLSLSLGK

SEQ ID NO: 364 - protein, 453 aa, synthetic construct
  REGION 1..453: note = CD86 ECD-Q25V/F33L/I89L/H90I-IgG4 Fc
APLKIQAYFNETADLPCQFANSQNVSLSELVVLWQDQENLVLNEVYLGKEKFDSVHSKYMGRTSFDSDSWTLRLHNLQIKDKGLYQCILIHKKPTGMIRIHQMNSELSVLANFSQPEIVPISNITENVYINLTCSSIHGYPEPKKMSVLLRTKNSTIEYDGVMQKSQDNVTELYDVSISLSVSFPDVTSNMTIFCILETDKTRLLSSPFSIELEDPQPPPDHIPESKYGPPCPSCPAPEFLGGPSVFLFPPKPKDTLMISRTPEVTCVVVDVSQEDPEVQFNWYVDGVEVHNAKTKPREEQFNSTYRVVSVLTVLHQDWLNGKEYKCKVSNKGLPSSIEKTISKAKGQPREPQVYTLPPSQEEMTKNQVSLTCLVKGFYPSDIAVEWESNGQPENNYKTTPPVLDSDGSFFLYSRLTVDKSRWQEGNVFSCSVMHEALHNHYTQKSLSLSLGK

SEQ ID NO: 365 - protein, 453 aa, synthetic construct
  REGION 1..453: note = CD86 ECD-Q25V/F33L/M60R/H90I-IgG4 Fc
APLKIQAYFNETADLPCQFANSQNVSLSELVVLWQDQENLVLNEVYLGKEKFDSVHSKYRGRTSFDSDSWTLRLHNLQIKDKGLYQCIIIHKKPTGMIRIHQMNSELSVLANFSQPEIVPISNITENVYINLTCSSIHGYPEPKKMSVLLRTKNSTIEYDGVMQKSQDNVTELYDVSISLSVSFPDVTSNMTIFCILETDKTRLLSSPFSIELEDPQPPPDHIPESKYGPPCPSCPAPEFLGGPSVFLFPPKPKDTLMISRTPEVTCVVVDVSQEDPEVQFNWYVDGVEVHNAKTKPREEQFNSTYRVVSVLTVLHQDWLNGKEYKCKVSNKGLPSSIEKTISKAKGQPREPQVYTLPPSQEEMTKNQVSLTCLVKGFYPSDIAVEWESNGQPENNYKTTPPVLDSDGSFFLYSRLTVDKSRWQEGNVFSCSVMHEALHNHYTQKSLSLSLGK

SEQ ID NO: 366 - protein, 453 aa, synthetic construct
  REGION 1..453: note = CD86 ECD-Q25F/F33L/H90I-IgG4 Fc
APLKIQAYFNETADLPCQFANSQNFSLSELVVLWQDQENLVLNEVYLGKEKFDSVHSKYMGRTSFDSDSWTLRLHNLQIKDKGLYQCIIIHKKPTGMIRIHQMNSELSVLANFSQPEIVPISNITENVYINLTCSSIHGYPEPKKMSVLLRTKNSTIEYDGVMQKSQDNVTELYDVSISLSVSFPDVTSNMTIFCILETDKTRLLSSPFSIELEDPQPPPDHIPESKYGPPCPSCPAPEFLGGPSVFLFPPKPKDTLMISRTPEVTCVVVDVSQEDPEVQFNWYVDGVEVHNAKTKPREEQFNSTYRVVSVLTVLHQDWLNGKEYKCKVSNKGLPSSIEKTISKAKGQPREPQVYTLPPSQEEMTKNQVSLTCLVKGFYPSDIAVEWESNGQPENNYKTTPPVLDSDGSFFLYSRLTVDKSRWQEGNVFSCSVMHEALHNHYTQKSLSLSLGK

SEQ ID NO: 367 - protein, 453 aa, synthetic construct
  REGION 1..453: note = CD86 ECD-Q25I/F33L/H90F-IgG4 Fc
APLKIQAYFNETADLPCQFANSQNISLSELVVLWQDQENLVLNEVYLGKEKFDSVHSKYMGRTSFDSDSWTLRLHNLQIKDKGLYQCIIFHKKPTGMIRIHQMNSELSVLANFSQPEIVPISNITENVYINLTCSSIHGYPEPKKMSVLLRTKNSTIEYDGVMQKSQDNVTELYDVSISLSVSFPDVTSNMTIFCILETDKTRLLSSPFSIELEDPQPPPDHIPESKYGPPCPSCPAPEFLGGPSVFLFPPKPKDTLMISRTPEVTCVVVDVSQEDPEVQFNWYVDGVEVHNAKTKPREEQFNSTYRVVSVLTVLHQDWLNGKEYKCKVSNKGLPSSIEKTISKAKGQPREPQVYTLPPSQEEMTKNQVSLTCLVKGFYPSDIAVEWESNGQPENNYKTTPPVLDSDGSFFLYSRLTVDKSRWQEGNVFSCSVMHEALHNHYTQKSLSLSLGK

SEQ ID NO: 368 - protein, 453 aa, synthetic construct
  REGION 1..453: note = CD86 ECD-Q25I/F33A/H90I-IgG4 Fc
APLKIQAYFNETADLPCQFANSQNISLSELVVAWQDQENLVLNEVYLGKEKFDSVHSKYMGRTSFDSDSWTLRLHNLQIKDKGLYQCIIIHKKPTGMIRIHQMNSELSVLANFSQPEIVPISNITENVYINLTCSSIHGYPEPKKMSVLLRTKNSTIEYDGVMQKSQDNVTELYDVSISLSVSFPDVTSNMTIFCILETDKTRLLSSPFSIELEDPQPPPDHIPESKYGPPCPSCPAPEFLGGPSVFLFPPKPKDTLMISRTPEVTCVVVDVSQEDPEVQFNWYVDGVEVHNAKTKPREEQFNSTYRVVSVLTVLHQDWLNGKEYKCKVSNKGLPSSIEKTISKAKGQPREPQVYTLPPSQEEMTKNQVSLTCLVKGFYPSDIAVEWESNGQPENNYKTTPPVLDSDGSFFLYSRLTVDKSRWQEGNVFSCSVMHEALHNHYTQKSLSLSLGK

SEQ ID NO: 369 - protein, 453 aa, synthetic construct
  REGION 1..453: note = CD86 ECD-Q25I/H90I-IgG4 Fc
APLKIQAYFNETADLPCQFANSQNISLSELVVFWQDQENLVLNEVYLGKEKFDSVHSKYMGRTSFDSDSWTLRLHNLQIKDKGLYQCIIIHKKPTGMIRIHQMNSELSVLANFSQPEIVPISNITENVYINLTCSSIHGYPEPKKMSVLLRTKNSTIEYDGVMQKSQDNVTELYDVSISLSVSFPDVTSNMTIFCILETDKTRLLSSPFSIELEDPQPPPDHIPESKYGPPCPSCPAPEFLGGPSVFLFPPKPKDTLMISRTPEVTCVVVDVSQEDPEVQFNWYVDGVEVHNAKTKPREEQFNSTYRVVSVLTVLHQDWLNGKEYKCKVSNKGLPSSIEKTISKAKGQPREPQVYTLPPSQEEMTKNQVSLTCLVKGFYPSDIAVEWESNGQPENNYKTTPPVLDSDGSFFLYSRLTVDKSRWQEGNVFSCSVMHEALHNHYTQKSLSLSLGK

SEQ ID NO: 370 - protein, 453 aa, synthetic construct
  REGION 1..453: note = CD86 ECD-Q25V/H90V-IgG4 Fc
APLKIQAYFNETADLPCQFANSQNVSLSELVVFWQDQENLVLNEVYLGKEKFDSVHSKYMGRTSFDSDSWTLRLHNLQIKDKGLYQCIIVHKKPTGMIRIHQMNSELSVLANFSQPEIVPISNITENVYINLTCSSIHGYPEPKKMSVLLRTKNSTIEYDGVMQKSQDNVTELYDVSISLSVSFPDVTSNMTIFCILETDKTRLLSSPFSIELEDPQPPPDHIPESKYGPPCPSCPAPEFLGGPSVFLFPPKPKDTLMISRTPEVTCVVVDVSQEDPEVQFNWYVDGVEVHNAKTKPREEQFNSTYRVVSVLTVLHQDWLNGKEYKCKVSNKGLPSSIEKTISKAKGQPREPQVYTLPPSQEEMTKNQVSLTCLVKGFYPSDIAVEWESNGQPENNYKTTPPVLDSDGSFFLYSRLTVDKSRWQEGNVFSCSVMHEALHNHYTQKSLSLSLGK

SEQ ID NO: 371 - protein, 453 aa, synthetic construct
  REGION 1..453: note = CD86 ECD-Q25V/H90I-IgG4 Fc
APLKIQAYFNETADLPCQFANSQNVSLSELVVFWQDQENLVLNEVYLGKEKFDSVHSKYMGRTSFDSDSWTLRLHNLQIKDKGLYQCIIIHKKPTGMIRIHQMNSELSVLANFSQPEIVPISNITENVYINLTCSSIHGYPEPKKMSVLLRTKNSTIEYDGVMQKSQDNVTELYDVSISLSVSFPDVTSNMTIFCILETDKTRLLSSPFSIELEDPQPPPDHIPESKYGPPCPSCPAPEFLGGPSVFLFPPKPKDTLMISRTPEVTCVVVDVSQEDPEVQFNWYVDGVEVHNAKTKPREEQFNSTYRVVSVLTVLHQDWLNGKEYKCKVSNKGLPSSIEKTISKAKGQPREPQVYTLPPSQEEMTKNQVSLTCLVKGFYPSDIAVEWESNGQPENNYKTTPPVLDSDGSFFLYSRLTVDKSRWQEGNVFSCSVMHEALHNHYTQKSLSLSLGK

SEQ ID NO: 372 - protein, 453 aa, synthetic construct
  REGION 1..453: note = CD86 ECD-Q25F/H90I-IgG4 Fc
APLKIQAYFNETADLPCQFANSQNFSLSELVVFWQDQENLVLNEVYLGKEKFDSVHSKYMGRTSFDSDSWTLRLHNLQIKDKGLYQCIIIHKKPTGMIRIHQMNSELSVLANFSQPEIVPISNITENVYINLTCSSIHGYPEPKKMSVLLRTKNSTIEYDGVMQKSQDNVTELYDVSISLSVSFPDVTSNMTIFCILETDKTRLLSSPFSIELEDPQPPPDHIPESKYGPPCPSCPAPEFLGGPSVFLFPPKPKDTLMISRTPEVTCVVVDVSQEDPEVQFNWYVDGVEVHNAKTKPREEQFNSTYRVVSVLTVLHQDWLNGKEYKCKVSNKGLPSSIEKTISKAKGQPREPQVYTLPPSQEEMTKNQVSLTCLVKGFYPSDIAVEWESNGQPENNYKTTPPVLDSDGSFFLYSRLTVDKSRWQEGNVFSCSVMHEALHNHYTQKSLSLSLGK

SEQ ID NO: 373 - protein, 453 aa, synthetic construct
  REGION 1..453: note = CD86 ECD-Q25F/H90V-IgG4 Fc
APLKIQAYFNETADLPCQFANSQNFSLSELVVFWQDQENLVLNEVYLGKEKFDSVHSKYMGRTSFDSDSWTLRLHNLQIKDKGLYQCIIVHKKPTGMIRIHQMNSELSVLANFSQPEIVPISNITENVYINLTCSSIHGYPEPKKMSVLLRTKNSTIEYDGVMQKSQDNVTELYDVSISLSVSFPDVTSNMTIFCILETDKTRLLSSPFSIELEDPQPPPDHIPESKYGPPCPSCPAPEFLGGPSVFLFPPKPKDTLMISRTPEVTCVVVDVSQEDPEVQFNWYVDGVEVHNAKTKPREEQFNSTYRVVSVLTVLHQDWLNGKEYKCKVSNKGLPSSIEKTISKAKGQPREPQVYTLPPSQEEMTKNQVSLTCLVKGFYPSDIAVEWESNGQPENNYKTTPPVLDSDGSFFLYSRLTVDKSRWQEGNVFSCSVMHEALHNHYTQKSLSLSLGK

SEQ ID NO: 374 - protein, 453 aa, synthetic construct
  REGION 1..453: note = CD86 ECD-A13F/Q25I/F33L/H90I-IgG4 Fc
APLKIQAYFNETFDLPCQFANSQNISLSELVVLWQDQENLVLNEVYLGKEKFDSVHSKYMGRTSFDSDSWTLRLHNLQIKDKGLYQCIIIHKKPTGMIRIHQMNSELSVLANFSQPEIVPISNITENVYINLTCSSIHGYPEPKKMSVLLRTKNSTIEYDGVMQKSQDNVTELYDVSISLSVSFPDVTSNMTIFCILETDKTRLLSSPFSIELEDPQPPPDHIPESKYGPPCPSCPAPEFLGGPSVFLFPPKPKDTLMISRTPEVTCVVVDVSQEDPEVQFNWYVDGVEVHNAKTKPREEQFNSTYRVVSVLTVLHQDWLNGKEYKCKVSNKGLPSSIEKTISKAKGQPREPQVYTLPPSQEEMTKNQVSLTCLVKGFYPSDIAVEWESNGQPENNYKTTPPVLDSDGSFFLYSRLTVDKSRWQEGNVFSCSVMHEALHNHYTQKSLSLSLGK

SEQ ID NO: 375 - protein, 453 aa, synthetic construct
  REGION 1..453: note = CD86 ECD-A13M/Q25I/F33L/H90I-IgG4 Fc
APLKIQAYFNETMDLPCQFANSQNISLSELVVLWQDQENLVLNEVYLGKEKFDSVHSKYMGRTSFDSDSWTLRLHNLQIKDKGLYQCIIIHKKPTGMIRIHQMNSELSVLANFSQPEIVPISNITENVYINLTCSSIHGYPEPKKMSVLLRTKNSTIEYDGVMQKSQDNVTELYDVSISLSVSFPDVTSNMTIFCILETDKTRLLSSPFSIELEDPQPPPDHIPESKYGPPCPSCPAPEFLGGPSVFLFPPKPKDTLMISRTPEVTCVVVDVSQEDPEVQFNWYVDGVEVHNAKTKPREEQFNSTYRVVSVLTVLHQDWLNGKEYKCKVSNKGLPSSIEKTISKAKGQPREPQVYTLPPSQEEMTKNQVSLTCLVKGFYPSDIAVEWESNGQPENNYKTTPPVLDSDGSFFLYSRLTVDKSRWQEGNVFSCSVMHEALHNHYTQKSLSLSLGK

SEQ ID NO: 376 - protein, 453 aa, synthetic construct
  REGION 1..453: note = CD86 ECD-Q25A/F33L/H90I-IgG4 Fc
APLKIQAYFNETADLPCQFANSQNASLSELVVLWQDQENLVLNEVYLGKEKFDSVHSKYMGRTSFDSDSWTLRLHNLQIKDKGLYQCIIIHKKPTGMIRIHQMNSELSVLANFSQPEIVPISNITENVYINLTCSSIHGYPEPKKMSVLLRTKNSTIEYDGVMQKSQDNVTELYDVSISLSVSFPDVTSNMTIFCILETDKTRLLSSPFSIELEDPQPPPDHIPESKYGPPCPSCPAPEFLGGPSVFLFPPKPKDTLMISRTPEVTCVVVDVSQEDPEVQFNWYVDGVEVHNAKTKPREEQFNSTYRVVSVLTVLHQDWLNGKEYKCKVSNKGLPSSIEKTISKAKGQPREPQVYTLPPSQEEMTKNQVSLTCLVKGFYPSDIAVEWESNGQPENNYKTTPPVLDSDGSFFLYSRLTVDKSRWQEGNVFSCSVMHEALHNHYTQKSLSLSLGK

SEQ ID NO: 377 - protein, 453 aa, synthetic construct
  REGION 1..453: note = CD86 ECD-Q25M/F33L/H90I-IgG4 Fc
APLKIQAYFNETADLPCQFANSQNMSLSELVVLWQDQENLVLNEVYLGKEKFDSVHSKYMGRTSFDSDSWTLRLHNLQIKDKGLYQCIIIHKKPTGMIRIHQMNSELSVLANFSQPEIVPISNITENVYINLTCSSIHGYPEPKKMSVLLRTKNSTIEYDGVMQKSQDNVTELYDVSISLSVSFPDVTSNMTIFCILETDKTRLLSSPFSIELEDPQPPPDHIPESKYGPPCPSCPAPEFLGGPSVFLFPPKPKDTLMISRTPEVTCVVVDVSQEDPEVQFNWYVDGVEVHNAKTKPREEQFNSTYRVVSVLTVLHQDWLNGKEYKCKVSNKGLPSSIEKTISKAKGQPREPQVYTLPPSQEEMTKNQVSLTCLVKGFYPSDIAVEWESNGQPENNYKTTPPVLDSDGSFFLYSRLTVDKSRWQEGNVFSCSVMHEALHNHYTQKSLSLSLGK

SEQ ID NO: 378 - protein, 453 aa, synthetic construct
  REGION 1..453: note = CD86 ECD-Q25I/F33M/H90I-IgG4 Fc
APLKIQAYFNETADLPCQFANSQNISLSELVVMWQDQENLVLNEVYLGKEKFDSVHSKYMGRTSFDSDSWTLRLHNLQIKDKGLYQCIIIHKKPTGMIRIHQMNSELSVLANFSQPEIVPISNITENVYINLTCSSIHGYPEPKKMSVLLRTKNSTIEYDGVMQKSQDNVTELYDVSISLSVSFPDVTSNMTIFCILETDKTRLLSSPFSIELEDPQPPPDHIPESKYGPPCPSCPAPEFLGGPSVFLFPPKPKDTLMISRTPEVTCVVVDVSQEDPEVQFNWYVDGVEVHNAKTKPREEQFNSTYRVVSVLTVLHQDWLNGKEYKCKVSNKGLPSSIEKTISKAKGQPREPQVYTLPPSQEEMTKNQVSLTCLVKGFYPSDIAVEWESNGQPENNYKTTPPVLDSDGSFFLYSRLTVDKSRWQEGNVFSCSVMHEALHNHYTQKSLSLSLGK

SEQ ID NO: 379 - protein, 453 aa, synthetic construct
  REGION 1..453: note = CD86 ECD-Q25I/F33L/I89V/H90I-IgG4 Fc
APLKIQAYFNETADLPCQFANSQNISLSELVVLWQDQENLVLNEVYLGKEKFDSVHSKYMGRTSFDSDSWTLRLHNLQIKDKGLYQCIVIHKKPTGMIRIHQMNSELSVLANFSQPEIVPISNITENVYINLTCSSIHGYPEPKKMSVLLRTKNSTIEYDGVMQKSQDNVTELYDVSISLSVSFPDVTSNMTIFCILETDKTRLLSSPFSIELEDPQPPPDHIPESKYGPPCPSCPAPEFLGGPSVFLFPPKPKDTLMISRTPEVTCVVVDVSQEDPEVQFNWYVDGVEVHNAKTKPREEQFNSTYRVVSVLTVLHQDWLNGKEYKCKVSNKGLPSSIEKTISKAKGQPREPQVYTLPPSQEEMTKNQVSLTCLVKGFYPSDIAVEWESNGQPENNYKTTPPVLDSDGSFFLYSRLTVDKSRWQEGNVFSCSVMHEALHNHYTQKSLSLSLGK

SEQ ID NO: 380 - protein, 453 aa, synthetic construct
  REGION 1..453: note = CD86 ECD-Q25I/F33L/I89F/H90I-IgG4 Fc
APLKIQAYFNETADLPCQFANSQNISLSELVVLWQDQENLVLNEVYLGKEKFDSVHSKYMGRTSFDSDSWTLRLHNLQIKDKGLYQCIFIHKKPTGMIRIHQMNSELSVLANFSQPEIVPISNITENVYINLTCSSIHGYPEPKKMSVLLRTKNSTIEYDGVMQKSQDNVTELYDVSISLSVSFPDVTSNMTIFCILETDKTRLLSSPFSIELEDPQPPPDHIPESKYGPPCPSCPAPEFLGGPSVFLFPPKPKDTLMISRTPEVTCVVVDVSQEDPEVQFNWYVDGVEVHNAKTKPREEQFNSTYRVVSVLTVLHQDWLNGKEYKCKVSNKGLPSSIEKTISKAKGQPREPQVYTLPPSQEEMTKNQVSLTCLVKGFYPSDIAVEWESNGQPENNYKTTPPVLDSDGSFFLYSRLTVDKSRWQEGNVFSCSVMHEALHNHYTQKSLSLSLGK

SEQ ID NO: 381 - protein, 453 aa, synthetic construct
  REGION 1..453: note = CD86 ECD-Q25I/F33L/I89M/H90I-IgG4 Fc
APLKIQAYFNETADLPCQFANSQNISLSELVVLWQDQENLVLNEVYLGKEKFDSVHSKYMGRTSFDSDSWTLRLHNLQIKDKGLYQCIMIHKKPTGMIRIHQMNSELSVLANFSQPEIVPISNITENVYINLTCSSIHGYPEPKKMSVLLRTKNSTIEYDGVMQKSQDNVTELYDVSISLSVSFPDVTSNMTIFCILETDKTRLLSSPFSIELEDPQPPPDHIPESKYGPPCPSCPAPEFLGGPSVFLFPPKPKDTLMISRTPEVTCVVVDVSQEDPEVQFNWYVDGVEVHNAKTKPREEQFNSTYRVVSVLTVLHQDWLNGKEYKCKVSNKGLPSSIEKTISKAKGQPREPQVYTLPPSQEEMTKNQVSLTCLVKGFYPSDIAVEWESNGQPENNYKTTPPVLDSDGSFFLYSRLTVDKSRWQEGNVFSCSVMHEALHNHYTQKSLSLSLGK

SEQ ID NO: 382 - protein, 453 aa, synthetic construct
  REGION 1..453: note = CD86 ECD-Q25I/F33L/H90M-IgG4 Fc
APLKIQAYFNETADLPCQFANSQNISLSELVVLWQDQENLVLNEVYLGKEKFDSVHSKYMGRTSFDSDSWTLRLHNLQIKDKGLYQCIIMHKKPTGMIRIHQMNSELSVLANFSQPEIVPISNITENVYINLTCSSIHGYPEPKKMSVLLRTKNSTIEYDGVMQKSQDNVTELYDVSISLSVSFPDVTSNMTIFCILETDKTRLLSSPFSIELEDPQPPPDHIPESKYGPPCPSCPAPEFLGGPSVFLFPPKPKDTLMISRTPEVTCVVVDVSQEDPEVQFNWYVDGVEVHNAKTKPREEQFNSTYRVVSVLTVLHQDWLNGKEYKCKVSNKGLPSSIEKTISKAKGQPREPQVYTLPPSQEEMTKNQVSLTCLVKGFYPSDIAVEWESNGQPENNYKTTPPVLDSDGSFFLYSRLTVDKSRWQEGNVFSCSVMHEALHNHYTQKSLSLSLGK

SEQ ID NO: 383 - protein, 453 aa, synthetic construct
  REGION 1..453: note = CD86 ECD-IgG4 Fc
APLKIQAYFNETADLPCQFANSQNQSLSELVVFWQDQENLVLNEVYLGKEKFDSVHSKYMGRTSFDSDSWTLRLHNLQIKDKGLYQCIIHHKKPTGMIRIHQMNSELSVLANFSQPEIVPISNITENVYINLTCSSIHGYPEPKKMSVLLRTKNSTIEYDGVMQKSQDNVTELYDVSISLSVSFPDVTSNMTIFCILETDKTRLLSSPFSIELEDPQPPPDHIPESKYGPPCPSCPAPEFLGGPSVFLFPPKPKDTLMISRTPEVTCVVVDVSQEDPEVQFNWYVDGVEVHNAKTKPREEQFNSTYRVVSVLTVLHQDWLNGKEYKCKVSNKGLPSSIEKTISKAKGQPREPQVYTLPPSQEEMTKNQVSLTCLVKGFYPSDIAVEWESNGQPENNYKTTPPVLDSDGSFFLYSRLTVDKSRWQEGNVFSCSVMHEALHNHYTQKSLSLSLGK

SEQ ID NO: 384 - protein, 339 aa, synthetic construct
  REGION 1..339: note = CD86 IgV-Q25I/F33L/H90I-IgG4 Fc
APLKIQAYFNETADLPCQFANSQNISLSELVVLWQDQENLVLNEVYLGKEKFDSVHSKYMGRTSFDSDSWTLRLHNLQIKDKGLYQCIIIHKKPTGMIRIHQMNSELSVLESKYGPPCPSCPAPEFLGGPSVFLFPPKPKDTLMISRTPEVTCVVVDVSQEDPEVQFNWYVDGVEVHNAKTKPREEQFNSTYRVVSVLTVLHQDWLNGKEYKCKVSNKGLPSSIEKTISKAKGQPREPQVYTLPPSQEEMTKNQVSLTCLVKGFYPSDIAVEWESNGQPENNYKTTPPVLDSDGSFFLYSRLTVDKSRWQEGNVFSCSVMHEALHNHYTQKSLSLSLGK

SEQ ID NO: 385 - protein, 339 aa, synthetic construct
  REGION 1..339: note = CD86 IgV-Q25V/F33L/H90I-IgG4 Fc
APLKIQAYFNETADLPCQFANSQNVSLSELVVLWQDQENLVLNEVYLGKEKFDSVHSKYMGRTSFDSDSWTLRLHNLQIKDKGLYQCIIIHKKPTGMIRIHQMNSELSVLESKYGPPCPSCPAPEFLGGPSVFLFPPKPKDTLMISRTPEVTCVVVDVSQEDPEVQFNWYVDGVEVHNAKTKPREEQFNSTYRVVSVLTVLHQDWLNGKEYKCKVSNKGLPSSIEKTISKAKGQPREPQVYTLPPSQEEMTKNQVSLTCLVKGFYPSDIAVEWESNGQPENNYKTTPPVLDSDGSFFLYSRLTVDKSRWQEGNVFSCSVMHEALHNHYTQKSLSLSLGK

SEQ ID NO: 386 - protein, 339 aa, synthetic construct
  REGION 1..339: note = CD86 IgV-Q25I/F33V/H90I-IgG4 Fc
APLKIQAYFNETADLPCQFANSQNISLSELVVVWQDQENLVLNEVYLGKEKFDSVHSKYMGRTSFDSDSWTLRLHNLQIKDKGLYQCIIIHKKPTGMIRIHQMNSELSVLESKYGPPCPSCPAPEFLGGPSVFLFPPKPKDTLMISRTPEVTCVVVDVSQEDPEVQFNWYVDGVEVHNAKTKPREEQFNSTYRVVSVLTVLHQDWLNGKEYKCKVSNKGLPSSIEKTISKAKGQPREPQVYTLPPSQEEMTKNQVSLTCLVKGFYPSDIAVEWESNGQPENNYKTTPPVLDSDGSFFLYSRLTVDKSRWQEGNVFSCSVMHEALHNHYTQKSLSLSLGK

SEQ ID NO: 387 - protein, 339 aa, synthetic construct
  REGION 1..339: note = CD86 IgV-Q25V/F33V/H90I-IgG4 Fc
APLKIQAYFNETADLPCQFANSQNVSLSELVVVWQDQENLVLNEVYLGKEKFDSVHSKYMGRTSFDSDSWTLRLHNLQIKDKGLYQCIIIHKKPTGMIRIHQMNSELSVLESKYGPPCPSCPAPEFLGGPSVFLFPPKPKDTLMISRTPEVTCVVVDVSQEDPEVQFNWYVDGVEVHNAKTKPREEQFNSTYRVVSVLTVLHQDWLNGKEYKCKVSNKGLPSSIEKTISKAKGQPREPQVYTLPPSQEEMTKNQVSLTCLVKGFYPSDIAVEWESNGQPENNYKTTPPVLDSDGSFFLYSRLTVDKSRWQEGNVFSCSVMHEALHNHYTQKSLSLSLGK

SEQ ID NO: 388 - protein, 339 aa, synthetic construct
  REGION 1..339: note = CD86 IgV-Q25I/F33L/H90V-IgG4 Fc
APLKIQAYFNETADLPCQFANSQNISLSELVVLWQDQENLVLNEVYLGKEKFDSVHSKYMGRTSFDSDSWTLRLHNLQIKDKGLYQCIIVHKKPTGMIRIHQMNSELSVLESKYGPPCPSCPAPEFLGGPSVFLFPPKPKDTLMISRTPEVTCVVVDVSQEDPEVQFNWYVDGVEVHNAKTKPREEQFNSTYRVVSVLTVLHQDWLNGKEYKCKVSNKGLPSSIEKTISKAKGQPREPQVYTLPPSQEEMTKNQVSLTCLVKGFYPSDIAVEWESNGQPENNYKTTPPVLDSDGSFFLYSRLTVDKSRWQEGNVFSCSVMHEALHNHYTQKSLSLSLGK

SEQ ID NO: 389 - protein, 339 aa, synthetic construct
  REGION 1..339: note = CD86 IgV-Q25V/F33L/H90V-IgG4 Fc
APLKIQAYFNETADLPCQFANSQNVSLSELVVLWQDQENLVLNEVYLGKEKFDSVHSKYMGRTSFDSDSWTLRLHNLQIKDKGLYQCIIVHKKPTGMIRIHQMNSELSVLESKYGPPCPSCPAPEFLGGPSVFLFPPKPKDTLMISRTPEVTCVVVDVSQEDPEVQFNWYVDGVEVHNAKTKPREEQFNSTYRVVSVLTVLHQDWLNGKEYKCKVSNKGLPSSIEKTISKAKGQPREPQVYTLPPSQEEMTKNQVSLTCLVKGFYPSDIAVEWESNGQPENNYKTTPPVLDSDGSFFLYSRLTVDKSRWQEGNVFSCSVMHEALHNHYTQKSLSLSLGK

SEQ ID NO: 390 - protein, 339 aa, synthetic construct
  REGION 1..339: note = CD86 IgV-Q25I/F33V/H90V-IgG4 Fc
APLKIQAYFNETADLPCQFANSQNISLSELVVVWQDQENLVLNEVYLGKEKFDSVHSKYMGRTSFDSDSWTLRLHNLQIKDKGLYQCIIVHKKPTGMIRIHQMNSELSVLESKYGPPCPSCPAPEFLGGPSVFLFPPKPKDTLMISRTPEVTCVVVDVSQEDPEVQFNWYVDGVEVHNAKTKPREEQFNSTYRVVSVLTVLHQDWLNGKEYKCKVSNKGLPSSIEKTISKAKGQPREPQVYTLPPSQEEMTKNQVSLTCLVKGFYPSDIAVEWESNGQPENNYKTTPPVLDSDGSFFLYSRLTVDKSRWQEGNVFSCSVMHEALHNHYTQKSLSLSLGK

SEQ ID NO: 391 - protein, 339 aa, synthetic construct
  REGION 1..339: note = CD86 IgV-Q25V/F33V/H90V-IgG4 Fc
APLKIQAYFNETADLPCQFANSQNVSLSELVVVWQDQENLVLNEVYLGKEKFDSVHSKYMGRTSFDSDSWTLRLHNLQIKDKGLYQCIIVHKKPTGMIRIHQMNSELSVLESKYGPPCPSCPAPEFLGGPSVFLFPPKPKDTLMISRTPEVTCVVVDVSQEDPEVQFNWYVDGVEVHNAKTKPREEQFNSTYRVVSVLTVLHQDWLNGKEYKCKVSNKGLPSSIEKTISKAKGQPREPQVYTLPPSQEEMTKNQVSLTCLVKGFYPSDIAVEWESNGQPENNYKTTPPVLDSDGSFFLYSRLTVDKSRWQEGNVFSCSVMHEALHNHYTQKSLSLSLGK

SEQ ID NO: 392 - protein, 339 aa, synthetic construct
  REGION 1..339: note = CD86 IgV-A13L/Q25I/F33L/H90I-IgG4 Fc
APLKIQAYFNETLDLPCQFANSQNISLSELVVLWQDQENLVLNEVYLGKEKFDSVHSKYMGRTSFDSDSWTLRLHNLQIKDKGLYQCIIIHKKPTGMIRIHQMNSELSVLESKYGPPCPSCPAPEFLGGPSVFLFPPKPKDTLMISRTPEVTCVVVDVSQEDPEVQFNWYVDGVEVHNAKTKPREEQFNSTYRVVSVLTVLHQDWLNGKEYKCKVSNKGLPSSIEKTISKAKGQPREPQVYTLPPSQEEMTKNQVSLTCLVKGFYPSDIAVEWESNGQPENNYKTTPPVLDSDGSFFLYSRLTVDKSRWQEGNVFSCSVMHEALHNHYTQKSLSLSLGK

SEQ ID NO: 393 - protein, 339 aa, synthetic construct
  REGION 1..339: note = CD86 IgV-A13I/Q25I/F33L/H90I-IgG4 Fc
APLKIQAYFNETIDLPCQFANSQNISLSELVVLWQDQENLVLNEVYLGKEKFDSVHSKYMGRTSFDSDSWTLRLHNLQIKDKGLYQCIIIHKKPTGMIRIHQMNSELSVLESKYGPPCPSCPAPEFLGGPSVFLFPPKPKDTLMISRTPEVTCVVVDVSQEDPEVQFNWYVDGVEVHNAKTKPREEQFNSTYRVVSVLTVLHQDWLNGKEYKCKVSNKGLPSSIEKTISKAKGQPREPQVYTLPPSQEEMTKNQVSLTCLVKGFYPSDIAVEWESNGQPENNYKTTPPVLDSDGSFFLYSRLTVDKSRWQEGNVFSCSVMHEALHNHYTQKSLSLSLGK

SEQ ID NO: 394 - protein, 339 aa, synthetic construct
  REGION 1..339: note = CD86 IgV-A13L/Q25V/F33L/H90I-IgG4 Fc
APLKIQAYFNETLDLPCQFANSQNVSLSELVVLWQDQENLVLNEVYLGKEKFDSVHSKYMGRTSFDSDSWTLRLHNLQIKDKGLYQCIIIHKKPTGMIRIHQMNSELSVLESKYGPPCPSCPAPEFLGGPSVFLFPPKPKDTLMISRTPEVTCVVVDVSQEDPEVQFNWYVDGVEVHNAKTKPREEQFNSTYRVVSVLTVLHQDWLNGKEYKCKVSNKGLPSSIEKTISKAKGQPREPQVYTLPPSQEEMTKNQVSLTCLVKGFYPSDIAVEWESNGQPENNYKTTPPVLDSDGSFFLYSRLTVDKSRWQEGNVFSCSVMHEALHNHYTQKSLSLSLGK

SEQ ID NO: 395 - protein, 339 aa, synthetic construct
  REGION 1..339: note = CD86 IgV-A13I/Q25V/F33L/H90I-IgG4 Fc
APLKIQAYFNETIDLPCQFANSQNVSLSELVVLWQDQENLVLNEVYLGKEKFDSVHSKYMGRTSFDSDSWTLRLHNLQIKDKGLYQCIIIHKKPTGMIRIHQMNSELSVLESKYGPPCPSCPAPEFLGGPSVFLFPPKPKDTLMISRTPEVTCVVVDVSQEDPEVQFNWYVDGVEVHNAKTKPREEQFNSTYRVVSVLTVLHQDWLNGKEYKCKVSNKGLPSSIEKTISKAKGQPREPQVYTLPPSQEEMTKNQVSLTCLVKGFYPSDIAVEWESNGQPENNYKTTPPVLDSDGSFFLYSRLTVDKSRWQEGNVFSCSVMHEALHNHYTQKSLSLSLGK

SEQ ID NO: 396 - protein, 339 aa, synthetic construct
  REGION 1..339: note = CD86 IgV-Q25I/F33L/I89L/H90I-IgG4 Fc
APLKIQAYFNETADLPCQFANSQNISLSELVVLWQDQENLVLNEVYLGKEKFDSVHSKYMGRTSFDSDSWTLRLHNLQIKDKGLYQCILIHKKPTGMIRIHQMNSELSVLESKYGPPCPSCPAPEFLGGPSVFLFPPKPKDTLMISRTPEVTCVVVDVSQEDPEVQFNWYVDGVEVHNAKTKPREEQFNSTYRVVSVLTVLHQDWLNGKEYKCKVSNKGLPSSIEKTISKAKGQPREPQVYTLPPSQEEMTKNQVSLTCLVKGFYPSDIAVEWESNGQPENNYKTTPPVLDSDGSFFLYSRLTVDKSRWQEGNVFSCSVMHEALHNHYTQKSLSLSLGK

SEQ ID NO: 397 - protein, 339 aa, synthetic construct
  REGION 1..339: note = CD86 IgV-Q25I/F33L/M60R/H90I-IgG4 Fc
APLKIQAYFNETADLPCQFANSQNISLSELVVLWQDQENLVLNEVYLGKEKFDSVHSKYRGRTSFDSDSWTLRLHNLQIKDKGLYQCIIIHKKPTGMIRIHQMNSELSVLESKYGPPCPSCPAPEFLGGPSVFLFPPKPKDTLMISRTPEVTCVVVDVSQEDPEVQFNWYVDGVEVHNAKTKPREEQFNSTYRVVSVLTVLHQDWLNGKEYKCKVSNKGLPSSIEKTISKAKGQPREPQVYTLPPSQEEMTKNQVSLTCLVKGFYPSDIAVEWESNGQPENNYKTTPPVLDSDGSFFLYSRLTVDKSRWQEGNVFSCSVMHEALHNHYTQKSLSLSLGK

SEQ ID NO: 398 - protein, 339 aa, synthetic construct
  REGION 1..339: note = CD86 IgV-Q25V/F33L/I89L/H90I-IgG4 Fc
APLKIQAYFNETADLPCQFANSQNVSLSELVVLWQDQENLVLNEVYLGKEKFDSVHSKYMGRTSFDSDSWTLRLHNLQIKDKGLYQCILIHKKPTGMIRIHQMNSELSVLESKYGPPCPSCPAPEFLGGPSVFLFPPKPKDTLMISRTPEVTCVVVDVSQEDPEVQFNWYVDGVEVHNAKTKPREEQFNSTYRVVSVLTVLHQDWLNGKEYKCKVSNKGLPSSIEKTISKAKGQPREPQVYTLPPSQEEMTKNQVSLTCLVKGFYPSDIAVEWESNGQPENNYKTTPPVLDSDGSFFLYSRLTVDKSRWQEGNVFSCSVMHEALHNHYTQKSLSLSLGK

SEQ ID NO: 399 - protein, 339 aa, synthetic construct
  REGION 1..339: note = CD86 IgV-Q25V/F33L/M60R/H90I-IgG4 Fc
APLKIQAYFNETADLPCQFANSQNVSLSELVVLWQDQENLVLNEVYLGKEKFDSVHSKYRGRTSFDSDSWTLRLHNLQIKDKGLYQCIIIHKKPTGMIRIHQMNSELSVLESKYGPPCPSCPAPEFLGGPSVFLFPPKPKDTLMISRTPEVTCVVVDVSQEDPEVQFNWYVDGVEVHNAKTKPREEQFNSTYRVVSVLTVLHQDWLNGKEYKCKVSNKGLPSSIEKTISKAKGQPREPQVYTLPPSQEEMTKNQVSLTCLVKGFYPSDIAVEWESNGQPENNYKTTPPVLDSDGSFFLYSRLTVDKSRWQEGNVFSCSVMHEALHNHYTQKSLSLSLGK

SEQ ID NO: 400 - protein, 339 aa, synthetic construct
  REGION 1..339: note = CD86 IgV-Q25F/F33L/H90I-IgG4 Fc
APLKIQAYFNETADLPCQFANSQNFSLSELVVLWQDQENLVLNEVYLGKEKFDSVHSKYMGRTSFDSDSWTLRLHNLQIKDKGLYQCIIIHKKPTGMIRIHQMNSELSVLESKYGPPCPSCPAPEFLGGPSVFLFPPKPKDTLMISRTPEVTCVVVDVSQEDPEVQFNWYVDGVEVHNAKTKPREEQFNSTYRVVSVLTVLHQDWLNGKEYKCKVSNKGLPSSIEKTISKAKGQPREPQVYTLPPSQEEMTKNQVSLTCLVKGFYPSDIAVEWESNGQPENNYKTTPPVLDSDGSFFLYSRLTVDKSRWQEGNVFSCSVMHEALHNHYTQKSLSLSLGK

SEQ ID NO: 401 - protein, 339 aa, synthetic construct
  REGION 1..339: note = CD86 IgV-Q25I/F33L/H90F-IgG4 Fc
APLKIQAYFNETADLPCQFANSQNISLSELVVLWQDQENLVLNEVYLGKEKFDSVHSKYMGRTSFDSDSWTLRLHNLQIKDKGLYQCIIFHKKPTGMIRIHQMNSELSVLESKYGPPCPSCPAPEFLGGPSVFLFPPKPKDTLMISRTPEVTCVVVDVSQEDPEVQFNWYVDGVEVHNAKTKPREEQFNSTYRVVSVLTVLHQDWLNGKEYKCKVSNKGLPSSIEKTISKAKGQPREPQVYTLPPSQEEMTKNQVSLTCLVKGFYPSDIAVEWESNGQPENNYKTTPPVLDSDGSFFLYSRLTVDKSRWQEGNVFSCSVMHEALHNHYTQKSLSLSLGK

SEQ ID NO: 402 - protein, 339 aa, synthetic construct
  REGION 1..339: note = CD86 IgV-Q25I/F33A/H90I-IgG4 Fc
APLKIQAYFNETADLPCQFANSQNISLSELVVAWQDQENLVLNEVYLGKEKFDSVHSKYMGRTSFDSDSWTLRLHNLQIKDKGLYQCIIIHKKPTGMIRIHQMNSELSVLESKYGPPCPSCPAPEFLGGPSVFLFPPKPKDTLMISRTPEVTCVVVDVSQEDPEVQFNWYVDGVEVHNAKTKPREEQFNSTYRVVSVLTVLHQDWLNGKEYKCKVSNKGLPSSIEKTISKAKGQPREPQVYTLPPSQEEMTKNQVSLTCLVKGFYPSDIAVEWESNGQPENNYKTTPPVLDSDGSFFLYSRLTVDKSRWQEGNVFSCSVMHEALHNHYTQKSLSLSLGK

SEQ ID NO: 403 - protein, 339 aa, synthetic construct
  REGION 1..339: note = CD86 IgV-Q25I/H90I-IgG4 Fc
APLKIQAYFNETADLPCQFANSQNISLSELVVFWQDQENLVLNEVYLGKEKFDSVHSKYMGRTSFDSDSWTLRLHNLQIKDKGLYQCIIIHKKPTGMIRIHQMNSELSVLESKYGPPCPSCPAPEFLGGPSVFLFPPKPKDTLMISRTPEVTCVVVDVSQEDPEVQFNWYVDGVEVHNAKTKPREEQFNSTYRVVSVLTVLHQDWLNGKEYKCKVSNKGLPSSIEKTISKAKGQPREPQVYTLPPSQEEMTKNQVSLTCLVKGFYPSDIAVEWESNGQPENNYKTTPPVLDSDGSFFLYSRLTVDKSRWQEGNVFSCSVMHEALHNHYTQKSLSLSLGK

SEQ ID NO: 404 - protein, 339 aa, synthetic construct
  REGION 1..339: note = CD86 IgV-Q25V/H90V-IgG4 Fc
APLKIQAYFNETADLPCQFANSQNVSLSELVVFWQDQENLVLNEVYLGKEKFDSVHSKYMGRTSFDSDSWTLRLHNLQIKDKGLYQCIIVHKKPTGMIRIHQMNSELSVLESKYGPPCPSCPAPEFLGGPSVFLFPPKPKDTLMISRTPEVTCVVVDVSQEDPEVQFNWYVDGVEVHNAKTKPREEQFNSTYRVVSVLTVLHQDWLNGKEYKCKVSNKGLPSSIEKTISKAKGQPREPQVYTLPPSQEEMTKNQVSLTCLVKGFYPSDIAVEWESNGQPENNYKTTPPVLDSDGSFFLYSRLTVDKSRWQEGNVFSCSVMHEALHNHYTQKSLSLSLGK

SEQ ID NO: 405 - protein, 339 aa, synthetic construct
  REGION 1..339: note = CD86 IgV-Q25V/H90I-IgG4 Fc
APLKIQAYFNETADLPCQFANSQNVSLSELVVFWQDQENLVLNEVYLGKEKFDSVHSKYMGRTSFDSDSWTLRLHNLQIKDKGLYQCIIIHKKPTGMIRIHQMNSELSVLESKYGPPCPSCPAPEFLGGPSVFLFPPKPKDTLMISRTPEVTCVVVDVSQEDPEVQFNWYVDGVEVHNAKTKPREEQFNSTYRVVSVLTVLHQDWLNGKEYKCKVSNKGLPSSIEKTISKAKGQPREPQVYTLPPSQEEMTKNQVSLTCLVKGFYPSDIAVEWESNGQPENNYKTTPPVLDSDGSFFLYSRLTVDKSRWQEGNVFSCSVMHEALHNHYTQKSLSLSLGK

SEQ ID NO: 406 - protein, 339 aa, synthetic construct
  REGION 1..339: note = CD86 IgV-Q25F/H90I-IgG4 Fc
APLKIQAYFNETADLPCQFANSQNFSLSELVVFWQDQENLVLNEVYLGKEKFDSVHSKYMGRTSFDSDSWTLRLHNLQIKDKGLYQCIIIHKKPTGMIRIHQMNSELSVLESKYGPPCPSCPAPEFLGGPSVFLFPPKPKDTLMISRTPEVTCVVVDVSQEDPEVQFNWYVDGVEVHNAKTKPREEQFNSTYRVVSVLTVLHQDWLNGKEYKCKVSNKGLPSSIEKTISKAKGQPREPQVYTLPPSQEEMTKNQVSLTCLVKGFYPSDIAVEWESNGQPENNYKTTPPVLDSDGSFFLYSRLTVDKSRWQEGNVFSCSVMHEALHNHYTQKSLSLSLGK

SEQ ID NO: 407 - protein, 339 aa, synthetic construct
  REGION 1..339: note = CD86 IgV-Q25F/H90V-IgG4 Fc
APLKIQAYFNETADLPCQFANSQNFSLSELVVFWQDQENLVLNEVYLGKEKFDSVHSKYMGRTSFDSDSWTLRLHNLQIKDKGLYQCIIVHKKPTGMIRIHQMNSELSVLESKYGPPCPSCPAPEFLGGPSVFLFPPKPKDTLMISRTPEVTCVVVDVSQEDPEVQFNWYVDGVEVHNAKTKPREEQFNSTYRVVSVLTVLHQDWLNGKEYKCKVSNKGLPSSIEKTISKAKGQPREPQVYTLPPSQEEMTKNQVSLTCLVKGFYPSDIAVEWESNGQPENNYKTTPPVLDSDGSFFLYSRLTVDKSRWQEGNVFSCSVMHEALHNHYTQKSLSLSLGK

SEQ ID NO: 408 - protein, 339 aa, synthetic construct
  REGION 1..339: note = CD86 IgV-A13F/Q25I/F33L/H90I-IgG4 Fc
APLKIQAYFNETFDLPCQFANSQNISLSELVVLWQDQENLVLNEVYLGKEKFDSVHSKYMGRTSFDSDSWTLRLHNLQIKDKGLYQCIIIHKKPTGMIRIHQMNSELSVLESKYGPPCPSCPAPEFLGGPSVFLFPPKPKDTLMISRTPEVTCVVVDVSQEDPEVQFNWYVDGVEVHNAKTKPREEQFNSTYRVVSVLTVLHQDWLNGKEYKCKVSNKGLPSSIEKTISKAKGQPREPQVYTLPPSQEEMTKNQVSLTCLVKGFYPSDIAVEWESNGQPENNYKTTPPVLDSDGSFFLYSRLTVDKSRWQEGNVFSCSVMHEALHNHYTQKSLSLSLGK

SEQ ID NO: 409 - protein, 339 aa, synthetic construct
  REGION 1..339: note = CD86 IgV-A13M/Q25I/F33L/H90I-IgG4 Fc
APLKIQAYFNETMDLPCQFANSQNISLSELVVLWQDQENLVLNEVYLGKEKFDSVHSKYMGRTSFDSDSWTLRLHNLQIKDKGLYQCIIIHKKPTGMIRIHQMNSELSVLESKYGPPCPSCPAPEFLGGPSVFLFPPKPKDTLMISRTPEVTCVVVDVSQEDPEVQFNWYVDGVEVHNAKTKPREEQFNSTYRVVSVLTVLHQDWLNGKEYKCKVSNKGLPSSIEKTISKAKGQPREPQVYTLPPSQEEMTKNQVSLTCLVKGFYPSDIAVEWESNGQPENNYKTTPPVLDSDGSFFLYSRLTVDKSRWQEGNVFSCSVMHEALHNHYTQKSLSLSLGK

SEQ ID NO: 410 - protein, 339 aa, synthetic construct
  REGION 1..339: note = CD86 IgV-Q25A/F33L/H90I-IgG4 Fc
APLKIQAYFNETADLPCQFANSQNASLSELVVLWQDQENLVLNEVYLGKEKFDSVHSKYMGRTSFDSDSWTLRLHNLQIKDKGLYQCIIIHKKPTGMIRIHQMNSELSVLESKYGPPCPSCPAPEFLGGPSVFLFPPKPKDTLMISRTPEVTCVVVDVSQEDPEVQFNWYVDGVEVHNAKTKPREEQFNSTYRVVSVLTVLHQDWLNGKEYKCKVSNKGLPSSIEKTISKAKGQPREPQVYTLPPSQEEMTKNQVSLTCLVKGFYPSDIAVEWESNGQPENNYKTTPPVLDSDGSFFLYSRLTVDKSRWQEGNVFSCSVMHEALHNHYTQKSLSLSLGK

SEQ ID NO: 411 - protein, 339 aa, synthetic construct
  REGION 1..339: note = CD86 IgV-Q25M/F33L/H90I-IgG4 Fc
APLKIQAYFNETADLPCQFANSQNMSLSELVVLWQDQENLVLNEVYLGKEKFDSVHSKYMGRTSFDSDSWTLRLHNLQIKDKGLYQCIIIHKKPTGMIRIHQMNSELSVLESKYGPPCPSCPAPEFLGGPSVFLFPPKPKDTLMISRTPEVTCVVVDVSQEDPEVQFNWYVDGVEVHNAKTKPREEQFNSTYRVVSVLTVLHQDWLNGKEYKCKVSNKGLPSSIEKTISKAKGQPREPQVYTLPPSQEEMTKNQVSLTCLVKGFYPSDIAVEWESNGQPENNYKTTPPVLDSDGSFFLYSRLTVDKSRWQEGNVFSCSVMHEALHNHYTQKSLSLSLGK

SEQ ID NO: 412 - protein, 339 aa, synthetic construct
  REGION 1..339: note = CD86 IgV-Q25I/F33M/H90I-IgG4 Fc
APLKIQAYFNETADLPCQFANSQNISLSELVVMWQDQENLVLNEVYLGKEKFDSVHSKYMGRTSFDSDSWTLRLHNLQIKDKGLYQCIIIHKKPTGMIRIHQMNSELSVLESKYGPPCPSCPAPEFLGGPSVFLFPPKPKDTLMISRTPEVTCVVVDVSQEDPEVQFNWYVDGVEVHNAKTKPREEQFNSTYRVVSVLTVLHQDWLNGKEYKCKVSNKGLPSSIEKTISKAKGQPREPQVYTLPPSQEEMTKNQVSLTCLVKGFYPSDIAVEWESNGQPENNYKTTPPVLDSDGSFFLYSRLTVDKSRWQEGNVFSCSVMHEALHNHYTQKSLSLSLGK

SEQ ID NO: 413 - protein, 339 aa, synthetic construct
  REGION 1..339: note = CD86 IgV-Q25I/F33L/I89V/H90I-IgG4 Fc
APLKIQAYFNETADLPCQFANSQNISLSELVVLWQDQENLVLNEVYLGKEKFDSVHSKYMGRTSFDSDSWTLRLHNLQIKDKGLYQCIVIHKKPTGMIRIHQMNSELSVLESKYGPPCPSCPAPEFLGGPSVFLFPPKPKDTLMISRTPEVTCVVVDVSQEDPEVQFNWYVDGVEVHNAKTKPREEQFNSTYRVVSVLTVLHQDWLNGKEYKCKVSNKGLPSSIEKTISKAKGQPREPQVYTLPPSQEEMTKNQVSLTCLVKGFYPSDIAVEWESNGQPENNYKTTPPVLDSDGSFFLYSRLTVDKSRWQEGNVFSCSVMHEALHNHYTQKSLSLSLGK

SEQ ID NO: 414 - protein, 339 aa, synthetic construct
  REGION 1..339: note = CD86 IgV-Q25I/F33L/I89F/H90I-IgG4 Fc
APLKIQAYFNETADLPCQFANSQNISLSELVVLWQDQENLVLNEVYLGKEKFDSVHSKYMGRTSFDSDSWTLRLHNLQIKDKGLYQCIFIHKKPTGMIRIHQMNSELSVLESKYGPPCPSCPAPEFLGGPSVFLFPPKPKDTLMISRTPEVTCVVVDVSQEDPEVQFNWYVDGVEVHNAKTKPREEQFNSTYRVVSVLTVLHQDWLNGKEYKCKVSNKGLPSSIEKTISKAKGQPREPQVYTLPPSQEEMTKNQVSLTCLVKGFYPSDIAVEWESNGQPENNYKTTPPVLDSDGSFFLYSRLTVDKSRWQEGNVFSCSVMHEALHNHYTQKSLSLSLGK

SEQ ID NO: 415 - protein, 339 aa, synthetic construct
  REGION 1..339: note = CD86 IgV-Q25I/F33L/I89M/H90I-IgG4 Fc
APLKIQAYFNETADLPCQFANSQNISLSELVVLWQDQENLVLNEVYLGKEKFDSVHSKYMGRTSFDSDSWTLRLHNLQIKDKGLYQCIMIHKKPTGMIRIHQMNSELSVLESKYGPPCPSCPAPEFLGGPSVFLFPPKPKDTLMISRTPEVTCVVVDVSQEDPEVQFNWYVDGVEVHNAKTKPREEQFNSTYRVVSVLTVLHQDWLNGKEYKCKVSNKGLPSSIEKTISKAKGQPREPQVYTLPPSQEEMTKNQVSLTCLVKGFYPSDIAVEWESNGQPENNYKTTPPVLDSDGSFFLYSRLTVDKSRWQEGNVFSCSVMHEALHNHYTQKSLSLSLGK

SEQ ID NO: 416 - protein, 339 aa, synthetic construct
  REGION 1..339: note = CD86 IgV-Q25I/F33L/H90M-IgG4 Fc
APLKIQAYFNETADLPCQFANSQNISLSELVVLWQDQENLVLNEVYLGKEKFDSVHSKYMGRTSFDSDSWTLRLHNLQIKDKGLYQCIIMHKKPTGMIRIHQMNSELSVLESKYGPPCPSCPAPEFLGGPSVFLFPPKPKDTLMISRTPEVTCVVVDVSQEDPEVQFNWYVDGVEVHNAKTKPREEQFNSTYRVVSVLTVLHQDWLNGKEYKCKVSNKGLPSSIEKTISKAKGQPREPQVYTLPPSQEEMTKNQVSLTCLVKGFYPSDIAVEWESNGQPENNYKTTPPVLDSDGSFFLYSRLTVDKSRWQEGNVFSCSVMHEALHNHYTQKSLSLSLGK

SEQ ID NO: 417 - protein, 339 aa, synthetic construct
  REGION 1..339: note = CD86 IgV-IgG4 Fc
APLKIQAYFNETADLPCQFANSQNQSLSELVVFWQDQENLVLNEVYLGKEKFDSVHSKYMGRTSFDSDSWTLRLHNLQIKDKGLYQCIIHHKKPTGMIRIHQMNSELSVLESKYGPPCPSCPAPEFLGGPSVFLFPPKPKDTLMISRTPEVTCVVVDVSQEDPEVQFNWYVDGVEVHNAKTKPREEQFNSTYRVVSVLTVLHQDWLNGKEYKCKVSNKGLPSSIEKTISKAKGQPREPQVYTLPPSQEEMTKNQVSLTCLVKGFYPSDIAVEWESNGQPENNYKTTPPVLDSDGSFFLYSRLTVDKSRWQEGNVFSCSVMHEALHNHYTQKSLSLSLGK

SEQ ID NO: 418 - protein, 693 aa, synthetic construct
  REGION 1..693: note = sugemalimab antibody heavy chain -CD86 ECD-Q25I/F33L/H90I
EVQLLESGGGLVQPGGSLRLSCAASGFTFSSYAMSWVRQAPGKGLEWVSGISGSGGFTYYADSVKGRFTISRDNSKNTLYLQMNSLRAEDTAVYYCAKPPRGYNYGPFDYWGQGTLVTVSSASTKGPSVFPLAPCSRSTSESTAALGCLVKDYFPEPVTVSWNSGALTSGVHTFPAVLQSSGLYSLSSVVTVPSSSLGTKTYTCNVDHKPSNTKVDKRVESKYGPPCPPCPAPEFLGGPSVFLFPPKPKDTLMISRTPEVTCVVVDVSQEDPEVQFNWYVDGVEVHNAKTKPREEQFNSTYRVVSVLTVLHQDWLNGKEYKCKVSNKGLPSSIEKTISKAKGQPREPQVYTLPPSQEEMTKNQVSLTCLVKGFYPSDIAVEWESNGQPENNYKTTPPVLDSDGSFFLYSRLTVDKSRWQEGNVFSCSVMHEALHNHYTQKSLSLSLGAGGGGSGGGGSGGGGSGGGGSGAPLKIQAYFNETADLPCQFANSQNISLSELVVLWQDQENLVLNEVYLGKEKFDSVHSKYMGRTSFDSDSWTLRLHNLQIKDKGLYQCIIIHKKPTGMIRIHQMNSELSVLANFSQPEIVPISNITENVYINLTCSSIHGYPEPKKMSVLLRTKNSTIEYDGVMQKSQDNVTELYDVSISLSVSFPDVTSNMTIFCILETDKTRLLSSPFSIELEDPQPPPDHIP

SEQ ID NO: 419 - protein, 693 aa, synthetic construct
  REGION 1..693: note = sugemalimab antibody heavy chain -CD86-ECD-Q25V/F33L/H90I
EVQLLESGGGLVQPGGSLRLSCAASGFTFSSYAMSWVRQAPGKGLEWVSGISGSGGFTYYADSVKGRFTISRDNSKNTLYLQMNSLRAEDTAVYYCAKPPRGYNYGPFDYWGQGTLVTVSSASTKGPSVFPLAPCSRSTSESTAALGCLVKDYFPEPVTVSWNSGALTSGVHTFPAVLQSSGLYSLSSVVTVPSSSLGTKTYTCNVDHKPSNTKVDKRVESKYGPPCPPCPAPEFLGGPSVFLFPPKPKDTLMISRTPEVTCVVVDVSQEDPEVQFNWYVDGVEVHNAKTKPREEQFNSTYRVVSVLTVLHQDWLNGKEYKCKVSNKGLPSSIEKTISKAKGQPREPQVYTLPPSQEEMTKNQVSLTCLVKGFYPSDIAVEWESNGQPENNYKTTPPVLDSDGSFFLYSRLTVDKSRWQEGNVFSCSVMHEALHNHYTQKSLSLSLGAGGGGSGGGGSGGGGSGGGGSGAPLKIQAYFNETADLPCQFANSQNVSLSELVVLWQDQENLVLNEVYLGKEKFDSVHSKYMGRTSFDSDSWTLRLHNLQIKDKGLYQCIIIHKKPTGMIRIHQMNSELSVLANFSQPEIVPISNITENVYINLTCSSIHGYPEPKKMSVLLRTKNSTIEYDGVMQKSQDNVTELYDVSISLSVSFPDVTSNMTIFCILETDKTRLLSSPFSIELEDPQPPPDHIP

SEQ ID NO: 420 - protein, 693 aa, synthetic construct
  REGION 1..693: note = sugemalimab antibody heavy chain -CD86 ECD-Q25I/F33V/H90I
EVQLLESGGGLVQPGGSLRLSCAASGFTFSSYAMSWVRQAPGKGLEWVSGISGSGGFTYYADSVKGRFTISRDNSKNTLYLQMNSLRAEDTAVYYCAKPPRGYNYGPFDYWGQGTLVTVSSASTKGPSVFPLAPCSRSTSESTAALGCLVKDYFPEPVTVSWNSGALTSGVHTFPAVLQSSGLYSLSSVVTVPSSSLGTKTYTCNVDHKPSNTKVDKRVESKYGPPCPPCPAPEFLGGPSVFLFPPKPKDTLMISRTPEVTCVVVDVSQEDPEVQFNWYVDGVEVHNAKTKPREEQFNSTYRVVSVLTVLHQDWLNGKEYKCKVSNKGLPSSIEKTISKAKGQPREPQVYTLPPSQEEMTKNQVSLTCLVKGFYPSDIAVEWESNGQPENNYKTTPPVLDSDGSFFLYSRLTVDKSRWQEGNVFSCSVMHEALHNHYTQKSLSLSLGAGGGGSGGGGSGGGGSGGGGSGAPLKIQAYFNETADLPCQFANSQNISLSELVVVWQDQENLVLNEVYLGKEKFDSVHSKYMGRTSFDSDSWTLRLHNLQIKDKGLYQCIIIHKKPTGMIRIHQMNSELSVLANFSQPEIVPISNITENVYINLTCSSIHGYPEPKKMSVLLRTKNSTIEYDGVMQKSQDNVTELYDVSISLSVSFPDVTSNMTIFCILETDKTRLLSSPFSIELEDPQPPPDHIP

SEQ ID NO: 421 - protein, 693 aa, synthetic construct
  REGION 1..693: note = sugemalimab antibody heavy chain -CD86 ECD-Q25V/F33V/H90I
EVQLLESGGGLVQPGGSLRLSCAASGFTFSSYAMSWVRQAPGKGLEWVSGISGSGGFTYYADSVKGRFTISRDNSKNTLYLQMNSLRAEDTAVYYCAKPPRGYNYGPFDYWGQGTLVTVSSASTKGPSVFPLAPCSRSTSESTAALGCLVKDYFPEPVTVSWNSGALTSGVHTFPAVLQSSGLYSLSSVVTVPSSSLGTKTYTCNVDHKPSNTKVDKRVESKYGPPCPPCPAPEFLGGPSVFLFPPKPKDTLMISRTPEVTCVVVDVSQEDPEVQFNWYVDGVEVHNAKTKPREEQFNSTYRVVSVLTVLHQDWLNGKEYKCKVSNKGLPSSIEKTISKAKGQPREPQVYTLPPSQEEMTKNQVSLTCLVKGFYPSDIAVEWESNGQPENNYKTTPPVLDSDGSFFLYSRLTVDKSRWQEGNVFSCSVMHEALHNHYTQKSLSLSLGAGGGGSGGGGSGGGGSGGGGSGAPLKIQAYFNETADLPCQFANSQNVSLSELVVVWQDQENLVLNEVYLGKEKFDSVHSKYMGRTSFDSDSWTLRLHNLQIKDKGLYQCIIIHKKPTGMIRIHQMNSELSVLANFSQPEIVPISNITENVYINLTCSSIHGYPEPKKMSVLLRTKNSTIEYDGVMQKSQDNVTELYDVSISLSVSFPDVTSNMTIFCILETDKTRLLSSPFSIELEDPQPPPDHIP

SEQ ID NO: 422 - protein, 693 aa, synthetic construct
  REGION 1..693: note = sugemalimab antibody heavy chain -CD86 ECD-Q25I/F33L/H90V
EVQLLESGGGLVQPGGSLRLSCAASGFTFSSYAMSWVRQAPGKGLEWVSGISGSGGFTYYADSVKGRFTISRDNSKNTLYLQMNSLRAEDTAVYYCAKPPRGYNYGPFDYWGQGTLVTVSSASTKGPSVFPLAPCSRSTSESTAALGCLVKDYFPEPVTVSWNSGALTSGVHTFPAVLQSSGLYSLSSVVTVPSSSLGTKTYTCNVDHKPSNTKVDKRVESKYGPPCPPCPAPEFLGGPSVFLFPPKPKDTLMISRTPEVTCVVVDVSQEDPEVQFNWYVDGVEVHNAKTKPREEQFNSTYRVVSVLTVLHQDWLNGKEYKCKVSNKGLPSSIEKTISKAKGQPREPQVYTLPPSQEEMTKNQVSLTCLVKGFYPSDIAVEWESNGQPENNYKTTPPVLDSDGSFFLYSRLTVDKSRWQEGNVFSCSVMHEALHNHYTQKSLSLSLGAGGGGSGGGGSGGGGSGGGGSGAPLKIQAYFNETADLPCQFANSQNISLSELVVLWQDQENLVLNEVYLGKEKFDSVHSKYMGRTSFDSDSWTLRLHNLQIKDKGLYQCIIVHKKPTGMIRIHQMNSELSVLANFSQPEIVPISNITENVYINLTCSSIHGYPEPKKMSVLLRTKNSTIEYDGVMQKSQDNVTELYDVSISLSVSFPDVTSNMTIFCILETDKTRLLSSPFSIELEDPQPPPDHIP

SEQ ID NO: 423 - protein, 693 aa, synthetic construct
  REGION 1..693: note = sugemalimab antibody heavy chain -CD86 ECD-Q25V/F33L/H90V
EVQLLESGGGLVQPGGSLRLSCAASGFTFSSYAMSWVRQAPGKGLEWVSGISGSGGFTYYADSVKGRFTISRDNSKNTLYLQMNSLRAEDTAVYYCAKPPRGYNYGPFDYWGQGTLVTVSSASTKGPSVFPLAPCSRSTSESTAALGCLVKDYFPEPVTVSWNSGALTSGVHTFPAVLQSSGLYSLSSVVTVPSSSLGTKTYTCNVDHKPSNTKVDKRVESKYGPPCPPCPAPEFLGGPSVFLFPPKPKDTLMISRTPEVTCVVVDVSQEDPEVQFNWYVDGVEVHNAKTKPREEQFNSTYRVVSVLTVLHQDWLNGKEYKCKVSNKGLPSSIEKTISKAKGQPREPQVYTLPPSQEEMTKNQVSLTCLVKGFYPSDIAVEWESNGQPENNYKTTPPVLDSDGSFFLYSRLTVDKSRWQEGNVFSCSVMHEALHNHYTQKSLSLSLGAGGGGSGGGGSGGGGSGGGGSGAPLKIQAYFNETADLPCQFANSQNVSLSELVVLWQDQENLVLNEVYLGKEKFDSVHSKYMGRTSFDSDSWTLRLHNLQIKDKGLYQCIIVHKKPTGMIRIHQMNSELSVLANFSQPEIVPISNITENVYINLTCSSIHGYPEPKKMSVLLRTKNSTIEYDGVMQKSQDNVTELYDVSISLSVSFPDVTSNMTIFCILETDKTRLLSSPFSIELEDPQPPPDHIP

SEQ ID NO: 424 - protein, 693 aa, synthetic construct
  REGION 1..693: note = sugemalimab antibody heavy chain -CD86 ECD-Q25I/F33V/H90V
EVQLLESGGGLVQPGGSLRLSCAASGFTFSSYAMSWVRQAPGKGLEWVSGISGSGGFTYYADSVKGRFTISRDNSKNTLYLQMNSLRAEDTAVYYCAKPPRGYNYGPFDYWGQGTLVTVSSASTKGPSVFPLAPCSRSTSESTAALGCLVKDYFPEPVTVSWNSGALTSGVHTFPAVLQSSGLYSLSSVVTVPSSSLGTKTYTCNVDHKPSNTKVDKRVESKYGPPCPPCPAPEFLGGPSVFLFPPKPKDTLMISRTPEVTCVVVDVSQEDPEVQFNWYVDGVEVHNAKTKPREEQFNSTYRVVSVLTVLHQDWLNGKEYKCKVSNKGLPSSIEKTISKAKGQPREPQVYTLPPSQEEMTKNQVSLTCLVKGFYPSDIAVEWESNGQPENNYKTTPPVLDSDGSFFLYSRLTVDKSRWQEGNVFSCSVMHEALHNHYTQKSLSLSLGAGGGGSGGGGSGGGGSGGGGSGAPLKIQAYFNETADLPCQFANSQNISLSELVVVWQDQENLVLNEVYLGKEKFDSVHSKYMGRTSFDSDSWTLRLHNLQIKDKGLYQCIIVHKKPTGMIRIHQMNSELSVLANFSQPEIVPISNITENVYINLTCSSIHGYPEPKKMSVLLRTKNSTIEYDGVMQKSQDNVTELYDVSISLSVSFPDVTSNMTIFCILETDKTRLLSSPFSIELEDPQPPPDHIP

SEQ ID NO: 425 - protein, 693 aa, synthetic construct
  REGION 1..693: note = sugemalimab antibody heavy chain -CD86 ECD-Q25V/F33V/H90V
EVQLLESGGGLVQPGGSLRLSCAASGFTFSSYAMSWVRQAPGKGLEWVSGISGSGGFTYYADSVKGRFTISRDNSKNTLYLQMNSLRAEDTAVYYCAKPPRGYNYGPFDYWGQGTLVTVSSASTKGPSVFPLAPCSRSTSESTAALGCLVKDYFPEPVTVSWNSGALTSGVHTFPAVLQSSGLYSLSSVVTVPSSSLGTKTYTCNVDHKPSNTKVDKRVESKYGPPCPPCPAPEFLGGPSVFLFPPKPKDTLMISRTPEVTCVVVDVSQEDPEVQFNWYVDGVEVHNAKTKPREEQFNSTYRVVSVLTVLHQDWLNGKEYKCKVSNKGLPSSIEKTISKAKGQPREPQVYTLPPSQEEMTKNQVSLTCLVKGFYPSDIAVEWESNGQPENNYKTTPPVLDSDGSFFLYSRLTVDKSRWQEGNVFSCSVMHEALHNHYTQKSLSLSLGAGGGGSGGGGSGGGGSGGGGSGAPLKIQAYFNETADLPCQFANSQNVSLSELVVVWQDQENLVLNEVYLGKEKFDSVHSKYMGRTSFDSDSWTLRLHNLQIKDKGLYQCIIVHKKPTGMIRIHQMNSELSVLANFSQPEIVPISNITENVYINLTCSSIHGYPEPKKMSVLLRTKNSTIEYDGVMQKSQDNVTELYDVSISLSVSFPDVTSNMTIFCILETDKTRLLSSPFSIELEDPQPPPDHIP

SEQ ID NO: 426 - protein, 693 aa, synthetic construct
  REGION 1..693: note = sugemalimab antibody heavy chain -CD86 ECD-A13L/Q25I/F33L/H90I
EVQLLESGGGLVQPGGSLRLSCAASGFTFSSYAMSWVRQAPGKGLEWVSGISGSGGFTYYADSVKGRFTISRDNSKNTLYLQMNSLRAEDTAVYYCAKPPRGYNYGPFDYWGQGTLVTVSSASTKGPSVFPLAPCSRSTSESTAALGCLVKDYFPEPVTVSWNSGALTSGVHTFPAVLQSSGLYSLSSVVTVPSSSLGTKTYTCNVDHKPSNTKVDKRVESKYGPPCPPCPAPEFLGGPSVFLFPPKPKDTLMISRTPEVTCVVVDVSQEDPEVQFNWYVDGVEVHNAKTKPREEQFNSTYRVVSVLTVLHQDWLNGKEYKCKVSNKGLPSSIEKTISKAKGQPREPQVYTLPPSQEEMTKNQVSLTCLVKGFYPSDIAVEWESNGQPENNYKTTPPVLDSDGSFFLYSRLTVDKSRWQEGNVFSCSVMHEALHNHYTQKSLSLSLGAGGGGSGGGGSGGGGSGGGGSGAPLKIQAYFNETLDLPCQFANSQNISLSELVVLWQDQENLVLNEVYLGKEKFDSVHSKYMGRTSFDSDSWTLRLHNLQIKDKGLYQCIIIHKKPTGMIRIHQMNSELSVLANFSQPEIVPISNITENVYINLTCSSIHGYPEPKKMSVLLRTKNSTIEYDGVMQKSQDNVTELYDVSISLSVSFPDVTSNMTIFCILETDKTRLLSSPFSIELEDPQPPPDHIP

SEQ ID NO: 427 - protein, 693 aa, synthetic construct
  REGION 1..693: note = sugemalimab antibody heavy chain -CD86 ECD-A13I/Q25I/F33L/H90I
EVQLLESGGGLVQPGGSLRLSCAASGFTFSSYAMSWVRQAPGKGLEWVSGISGSGGFTYYADSVKGRFTISRDNSKNTLYLQMNSLRAEDTAVYYCAKPPRGYNYGPFDYWGQGTLVTVSSASTKGPSVFPLAPCSRSTSESTAALGCLVKDYFPEPVTVSWNSGALTSGVHTFPAVLQSSGLYSLSSVVTVPSSSLGTKTYTCNVDHKPSNTKVDKRVESKYGPPCPPCPAPEFLGGPSVFLFPPKPKDTLMISRTPEVTCVVVDVSQEDPEVQFNWYVDGVEVHNAKTKPREEQFNSTYRVVSVLTVLHQDWLNGKEYKCKVSNKGLPSSIEKTISKAKGQPREPQVYTLPPSQEEMTKNQVSLTCLVKGFYPSDIAVEWESNGQPENNYKTTPPVLDSDGSFFLYSRLTVDKSRWQEGNVFSCSVMHEALHNHYTQKSLSLSLGAGGGGSGGGGSGGGGSGGGGSGAPLKIQAYFNETIDLPCQFANSQNISLSELVVLWQDQENLVLNEVYLGKEKFDSVHSKYMGRTSFDSDSWTLRLHNLQIKDKGLYQCIIIHKKPTGMIRIHQMNSELSVLANFSQPEIVPISNITENVYINLTCSSIHGYPEPKKMSVLLRTKNSTIEYDGVMQKSQDNVTELYDVSISLSVSFPDVTSNMTIFCILETDKTRLLSSPFSIELEDPQPPPDHIP

SEQ ID NO: 428 - protein, 693 aa, synthetic construct
  REGION 1..693: note = sugemalimab antibody heavy chain -CD86 ECD-A13L/Q25V/F33L/H90I
EVQLLESGGGLVQPGGSLRLSCAASGFTFSSYAMSWVRQAPGKGLEWVSGISGSGGFTYYADSVKGRFTISRDNSKNTLYLQMNSLRAEDTAVYYCAKPPRGYNYGPFDYWGQGTLVTVSSASTKGPSVFPLAPCSRSTSESTAALGCLVKDYFPEPVTVSWNSGALTSGVHTFPAVLQSSGLYSLSSVVTVPSSSLGTKTYTCNVDHKPSNTKVDKRVESKYGPPCPPCPAPEFLGGPSVFLFPPKPKDTLMISRTPEVTCVVVDVSQEDPEVQFNWYVDGVEVHNAKTKPREEQFNSTYRVVSVLTVLHQDWLNGKEYKCKVSNKGLPSSIEKTISKAKGQPREPQVYTLPPSQEEMTKNQVSLTCLVKGFYPSDIAVEWESNGQPENNYKTTPPVLDSDGSFFLYSRLTVDKSRWQEGNVFSCSVMHEALHNHYTQKSLSLSLGAGGGGSGGGGSGGGGSGGGGSGAPLKIQAYFNETLDLPCQFANSQNVSLSELVVLWQDQENLVLNEVYLGKEKFDSVHSKYMGRTSFDSDSWTLRLHNLQIKDKGLYQCIIIHKKPTGMIRIHQMNSELSVLANFSQPEIVPISNITENVYINLTCSSIHGYPEPKKMSVLLRTKNSTIEYDGVMQKSQDNVTELYDVSISLSVSFPDVTSNMTIFCILETDKTRLLSSPFSIELEDPQPPPDHIP

SEQ ID NO: 429 - protein, 693 aa, synthetic construct
  REGION 1..693: note = sugemalimab antibody heavy chain -CD86 ECD-A13I/Q25V/F33L/H90I
EVQLLESGGGLVQPGGSLRLSCAASGFTFSSYAMSWVRQAPGKGLEWVSGISGSGGFTYYADSVKGRFTISRDNSKNTLYLQMNSLRAEDTAVYYCAKPPRGYNYGPFDYWGQGTLVTVSSASTKGPSVFPLAPCSRSTSESTAALGCLVKDYFPEPVTVSWNSGALTSGVHTFPAVLQSSGLYSLSSVVTVPSSSLGTKTYTCNVDHKPSNTKVDKRVESKYGPPCPPCPAPEFLGGPSVFLFPPKPKDTLMISRTPEVTCVVVDVSQEDPEVQFNWYVDGVEVHNAKTKPREEQFNSTYRVVSVLTVLHQDWLNGKEYKCKVSNKGLPSSIEKTISKAKGQPREPQVYTLPPSQEEMTKNQVSLTCLVKGFYPSDIAVEWESNGQPENNYKTTPPVLDSDGSFFLYSRLTVDKSRWQEGNVFSCSVMHEALHNHYTQKSLSLSLGAGGGGSGGGGSGGGGSGGGGSGAPLKIQAYFNETIDLPCQFANSQNVSLSELVVLWQDQENLVLNEVYLGKEKFDSVHSKYMGRTSFDSDSWTLRLHNLQIKDKGLYQCIIIHKKPTGMIRIHQMNSELSVLANFSQPEIVPISNITENVYINLTCSSIHGYPEPKKMSVLLRTKNSTIEYDGVMQKSQDNVTELYDVSISLSVSFPDVTSNMTIFCILETDKTRLLSSPFSIELEDPQPPPDHIP

SEQ ID NO: 430 - protein, 693 aa, synthetic construct
  REGION 1..693: note = sugemalimab antibody heavy chain -CD86 ECD-Q25I/F33L/I89L/H90I
EVQLLESGGGLVQPGGSLRLSCAASGFTFSSYAMSWVRQAPGKGLEWVSGISGSGGFTYYADSVKGRFTISRDNSKNTLYLQMNSLRAEDTAVYYCAKPPRGYNYGPFDYWGQGTLVTVSSASTKGPSVFPLAPCSRSTSESTAALGCLVKDYFPEPVTVSWNSGALTSGVHTFPAVLQSSGLYSLSSVVTVPSSSLGTKTYTCNVDHKPSNTKVDKRVESKYGPPCPPCPAPEFLGGPSVFLFPPKPKDTLMISRTPEVTCVVVDVSQEDPEVQFNWYVDGVEVHNAKTKPREEQFNSTYRVVSVLTVLHQDWLNGKEYKCKVSNKGLPSSIEKTISKAKGQPREPQVYTLPPSQEEMTKNQVSLTCLVKGFYPSDIAVEWESNGQPENNYKTTPPVLDSDGSFFLYSRLTVDKSRWQEGNVFSCSVMHEALHNHYTQKSLSLSLGAGGGGSGGGGSGGGGSGGGGSGAPLKIQAYFNETADLPCQFANSQNISLSELVVLWQDQENLVLNEVYLGKEKFDSVHSKYMGRTSFDSDSWTLRLHNLQIKDKGLYQCILIHKKPTGMIRIHQMNSELSVLANFSQPEIVPISNITENVYINLTCSSIHGYPEPKKMSVLLRTKNSTIEYDGVMQKSQDNVTELYDVSISLSVSFPDVTSNMTIFCILETDKTRLLSSPFSIELEDPQPPPDHIP

SEQ ID NO: 431 - protein, 693 aa, synthetic construct
  REGION 1..693: note = sugemalimab antibody heavy chain -CD86 ECD-Q25I/F33L/M60R/H90I
EVQLLESGGGLVQPGGSLRLSCAASGFTFSSYAMSWVRQAPGKGLEWVSGISGSGGFTYYADSVKGRFTISRDNSKNTLYLQMNSLRAEDTAVYYCAKPPRGYNYGPFDYWGQGTLVTVSSASTKGPSVFPLAPCSRSTSESTAALGCLVKDYFPEPVTVSWNSGALTSGVHTFPAVLQSSGLYSLSSVVTVPSSSLGTKTYTCNVDHKPSNTKVDKRVESKYGPPCPPCPAPEFLGGPSVFLFPPKPKDTLMISRTPEVTCVVVDVSQEDPEVQFNWYVDGVEVHNAKTKPREEQFNSTYRVVSVLTVLHQDWLNGKEYKCKVSNKGLPSSIEKTISKAKGQPREPQVYTLPPSQEEMTKNQVSLTCLVKGFYPSDIAVEWESNGQPENNYKTTPPVLDSDGSFFLYSRLTVDKSRWQEGNVFSCSVMHEALHNHYTQKSLSLSLGAGGGGSGGGGSGGGGSGGGGSGAPLKIQAYFNETADLPCQFANSQNISLSELVVLWQDQENLVLNEVYLGKEKFDSVHSKYRGRTSFDSDSWTLRLHNLQIKDKGLYQCIIIHKKPTGMIRIHQMNSELSVLANFSQPEIVPISNITENVYINLTCSSIHGYPEPKKMSVLLRTKNSTIEYDGVMQKSQDNVTELYDVSISLSVSFPDVTSNMTIFCILETDKTRLLSSPFSIELEDPQPPPDHIP

SEQ ID NO: 432 - protein, 693 aa, synthetic construct
  REGION 1..693: note = sugemalimab antibody heavy chain -CD86 ECD-Q25V/F33L/I89L/H90I
EVQLLESGGGLVQPGGSLRLSCAASGFTFSSYAMSWVRQAPGKGLEWVSGISGSGGFTYYADSVKGRFTISRDNSKNTLYLQMNSLRAEDTAVYYCAKPPRGYNYGPFDYWGQGTLVTVSSASTKGPSVFPLAPCSRSTSESTAALGCLVKDYFPEPVTVSWNSGALTSGVHTFPAVLQSSGLYSLSSVVTVPSSSLGTKTYTCNVDHKPSNTKVDKRVESKYGPPCPPCPAPEFLGGPSVFLFPPKPKDTLMISRTPEVTCVVVDVSQEDPEVQFNWYVDGVEVHNAKTKPREEQFNSTYRVVSVLTVLHQDWLNGKEYKCKVSNKGLPSSIEKTISKAKGQPREPQVYTLPPSQEEMTKNQVSLTCLVKGFYPSDIAVEWESNGQPENNYKTTPPVLDSDGSFFLYSRLTVDKSRWQEGNVFSCSVMHEALHNHYTQKSLSLSLGAGGGGSGGGGSGGGGSGGGGSGAPLKIQAYFNETADLPCQFANSQNVSLSELVVLWQDQENLVLNEVYLGKEKFDSVHSKYMGRTSFDSDSWTLRLHNLQIKDKGLYQCILIHKKPTGMIRIHQMNSELSVLANFSQPEIVPISNITENVYINLTCSSIHGYPEPKKMSVLLRTKNSTIEYDGVMQKSQDNVTELYDVSISLSVSFPDVTSNMTIFCILETDKTRLLSSPFSIELEDPQPPPDHIP

SEQ ID NO: 433 - protein, 693 aa, synthetic construct
  REGION 1..693: note = sugemalimab antibody heavy chain -CD86 ECD-Q25V/F33L/M60R/H90I
EVQLLESGGGLVQPGGSLRLSCAASGFTFSSYAMSWVRQAPGKGLEWVSGISGSGGFTYYADSVKGRFTISRDNSKNTLYLQMNSLRAEDTAVYYCAKPPRGYNYGPFDYWGQGTLVTVSSASTKGPSVFPLAPCSRSTSESTAALGCLVKDYFPEPVTVSWNSGALTSGVHTFPAVLQSSGLYSLSSVVTVPSSSLGTKTYTCNVDHKPSNTKVDKRVESKYGPPCPPCPAPEFLGGPSVFLFPPKPKDTLMISRTPEVTCVVVDVSQEDPEVQFNWYVDGVEVHNAKTKPREEQFNSTYRVVSVLTVLHQDWLNGKEYKCKVSNKGLPSSIEKTISKAKGQPREPQVYTLPPSQEEMTKNQVSLTCLVKGFYPSDIAVEWESNGQPENNYKTTPPVLDSDGSFFLYSRLTVDKSRWQEGNVFSCSVMHEALHNHYTQKSLSLSLGAGGGGSGGGGSGGGGSGGGGSGAPLKIQAYFNETADLPCQFANSQNVSLSELVVLWQDQENLVLNEVYLGKEKFDSVHSKYRGRTSFDSDSWTLRLHNLQIKDKGLYQCIIIHKKPTGMIRIHQMNSELSVLANFSQPEIVPISNITENVYINLTCSSIHGYPEPKKMSVLLRTKNSTIEYDGVMQKSQDNVTELYDVSISLSVSFPDVTSNMTIFCILETDKTRLLSSPFSIELEDPQPPPDHIP

SEQ ID NO: 434 - protein, 693 aa, synthetic construct
  REGION 1..693: note = sugemalimab antibody heavy chain -CD86 ECD-Q25F/F33L/H90I
EVQLLESGGGLVQPGGSLRLSCAASGFTFSSYAMSWVRQAPGKGLEWVSGISGSGGFTYYADSVKGRFTISRDNSKNTLYLQMNSLRAEDTAVYYCAKPPRGYNYGPFDYWGQGTLVTVSSASTKGPSVFPLAPCSRSTSESTAALGCLVKDYFPEPVTVSWNSGALTSGVHTFPAVLQSSGLYSLSSVVTVPSSSLGTKTYTCNVDHKPSNTKVDKRVESKYGPPCPPCPAPEFLGGPSVFLFPPKPKDTLMISRTPEVTCVVVDVSQEDPEVQFNWYVDGVEVHNAKTKPREEQFNSTYRVVSVLTVLHQDWLNGKEYKCKVSNKGLPSSIEKTISKAKGQPREPQVYTLPPSQEEMTKNQVSLTCLVKGFYPSDIAVEWESNGQPENNYKTTPPVLDSDGSFFLYSRLTVDKSRWQEGNVFSCSVMHEALHNHYTQKSLSLSLGAGGGGSGGGGSGGGGSGGGGSGAPLKIQAYFNETADLPCQFANSQNFSLSELVVLWQDQENLVLNEVYLGKEKFDSVHSKYMGRTSFDSDSWTLRLHNLQIKDKGLYQCIIIHKKPTGMIRIHQMNSELSVLANFSQPEIVPISNITENVYINLTCSSIHGYPEPKKMSVLLRTKNSTIEYDGVMQKSQDNVTELYDVSISLSVSFPDVTSNMTIFCILETDKTRLLSSPFSIELEDPQPPPDHIP

SEQ ID NO: 435 - protein, 693 aa, synthetic construct
  REGION 1..693: note = sugemalimab antibody heavy chain -CD86 ECD-Q25I/F33L/H90F
EVQLLESGGGLVQPGGSLRLSCAASGFTFSSYAMSWVRQAPGKGLEWVSGISGSGGFTYYADSVKGRFTISRDNSKNTLYLQMNSLRAEDTAVYYCAKPPRGYNYGPFDYWGQGTLVTVSSASTKGPSVFPLAPCSRSTSESTAALGCLVKDYFPEPVTVSWNSGALTSGVHTFPAVLQSSGLYSLSSVVTVPSSSLGTKTYTCNVDHKPSNTKVDKRVESKYGPPCPPCPAPEFLGGPSVFLFPPKPKDTLMISRTPEVTCVVVDVSQEDPEVQFNWYVDGVEVHNAKTKPREEQFNSTYRVVSVLTVLHQDWLNGKEYKCKVSNKGLPSSIEKTISKAKGQPREPQVYTLPPSQEEMTKNQVSLTCLVKGFYPSDIAVEWESNGQPENNYKTTPPVLDSDGSFFLYSRLTVDKSRWQEGNVFSCSVMHEALHNHYTQKSLSLSLGAGGGGSGGGGSGGGGSGGGGSGAPLKIQAYFNETADLPCQFANSQNISLSELVVLWQDQENLVLNEVYLGKEKFDSVHSKYMGRTSFDSDSWTLRLHNLQIKDKGLYQCIIFHKKPTGMIRIHQMNSELSVLANFSQPEIVPISNITENVYINLTCSSIHGYPEPKKMSVLLRTKNSTIEYDGVMQKSQDNVTELYDVSISLSVSFPDVTSNMTIFCILETDKTRLLSSPFSIELEDPQPPPDHIP

SEQ ID NO: 436 - protein, 693 aa, synthetic construct
  REGION 1..693: note = sugemalimab antibody heavy chain -CD86 ECD-Q25I/F33A/H90I
EVQLLESGGGLVQPGGSLRLSCAASGFTFSSYAMSWVRQAPGKGLEWVSGISGSGGFTYYADSVKGRFTISRDNSKNTLYLQMNSLRAEDTAVYYCAKPPRGYNYGPFDYWGQGTLVTVSSASTKGPSVFPLAPCSRSTSESTAALGCLVKDYFPEPVTVSWNSGALTSGVHTFPAVLQSSGLYSLSSVVTVPSSSLGTKTYTCNVDHKPSNTKVDKRVESKYGPPCPPCPAPEFLGGPSVFLFPPKPKDTLMISRTPEVTCVVVDVSQEDPEVQFNWYVDGVEVHNAKTKPREEQFNSTYRVVSVLTVLHQDWLNGKEYKCKVSNKGLPSSIEKTISKAKGQPREPQVYTLPPSQEEMTKNQVSLTCLVKGFYPSDIAVEWESNGQPENNYKTTPPVLDSDGSFFLYSRLTVDKSRWQEGNVFSCSVMHEALHNHYTQKSLSLSLGAGGGGSGGGGSGGGGSGGGGSGAPLKIQAYFNETADLPCQFANSQNISLSELVVAWQDQENLVLNEVYLGKEKFDSVHSKYMGRTSFDSDSWTLRLHNLQIKDKGLYQCIIIHKKPTGMIRIHQMNSELSVLANFSQPEIVPISNITENVYINLTCSSIHGYPEPKKMSVLLRTKNSTIEYDGVMQKSQDNVTELYDVSISLSVSFPDVTSNMTIFCILETDKTRLLSSPFSIELEDPQPPPDHIP

SEQ ID NO: 437 - protein, 693 aa, synthetic construct
  REGION 1..693: note = sugemalimab antibody heavy chain -CD86 ECD-Q25I/H90I
EVQLLESGGGLVQPGGSLRLSCAASGFTFSSYAMSWVRQAPGKGLEWVSGISGSGGFTYYADSVKGRFTISRDNSKNTLYLQMNSLRAEDTAVYYCAKPPRGYNYGPFDYWGQGTLVTVSSASTKGPSVFPLAPCSRSTSESTAALGCLVKDYFPEPVTVSWNSGALTSGVHTFPAVLQSSGLYSLSSVVTVPSSSLGTKTYTCNVDHKPSNTKVDKRVESKYGPPCPPCPAPEFLGGPSVFLFPPKPKDTLMISRTPEVTCVVVDVSQEDPEVQFNWYVDGVEVHNAKTKPREEQFNSTYRVVSVLTVLHQDWLNGKEYKCKVSNKGLPSSIEKTISKAKGQPREPQVYTLPPSQEEMTKNQVSLTCLVKGFYPSDIAVEWESNGQPENNYKTTPPVLDSDGSFFLYSRLTVDKSRWQEGNVFSCSVMHEALHNHYTQKSLSLSLGAGGGGSGGGGSGGGGSGGGGSGAPLKIQAYFNETADLPCQFANSQNISLSELVVFWQDQENLVLNEVYLGKEKFDSVHSKYMGRTSFDSDSWTLRLHNLQIKDKGLYQCIIIHKKPTGMIRIHQMNSELSVLANFSQPEIVPISNITENVYINLTCSSIHGYPEPKKMSVLLRTKNSTIEYDGVMQKSQDNVTELYDVSISLSVSFPDVTSNMTIFCILETDKTRLLSSPFSIELEDPQPPPDHIP

SEQ ID NO: 438 - protein, 693 aa, synthetic construct
  REGION 1..693: note = sugemalimab antibody heavy chain -CD86 ECD-Q25V/H90V
EVQLLESGGGLVQPGGSLRLSCAASGFTFSSYAMSWVRQAPGKGLEWVSGISGSGGFTYYADSVKGRFTISRDNSKNTLYLQMNSLRAEDTAVYYCAKPPRGYNYGPFDYWGQGTLVTVSSASTKGPSVFPLAPCSRSTSESTAALGCLVKDYFPEPVTVSWNSGALTSGVHTFPAVLQSSGLYSLSSVVTVPSSSLGTKTYTCNVDHKPSNTKVDKRVESKYGPPCPPCPAPEFLGGPSVFLFPPKPKDTLMISRTPEVTCVVVDVSQEDPEVQFNWYVDGVEVHNAKTKPREEQFNSTYRVVSVLTVLHQDWLNGKEYKCKVSNKGLPSSIEKTISKAKGQPREPQVYTLPPSQEEMTKNQVSLTCLVKGFYPSDIAVEWESNGQPENNYKTTPPVLDSDGSFFLYSRLTVDKSRWQEGNVFSCSVMHEALHNHYTQKSLSLSLGAGGGGSGGGGSGGGGSGGGGSGAPLKIQAYFNETADLPCQFANSQNVSLSELVVFWQDQENLVLNEVYLGKEKFDSVHSKYMGRTSFDSDSWTLRLHNLQIKDKGLYQCIIVHKKPTGMIRIHQMNSELSVLANFSQPEIVPISNITENVYINLTCSSIHGYPEPKKMSVLLRTKNSTIEYDGVMQKSQDNVTELYDVSISLSVSFPDVTSNMTIFCILETDKTRLLSSPFSIELEDPQPPPDHIP

SEQ ID NO: 439 - protein, 693 aa, synthetic construct
  REGION 1..693: note = sugemalimab antibody heavy chain -CD86 ECD-Q25V/H90I
EVQLLESGGGLVQPGGSLRLSCAASGFTFSSYAMSWVRQAPGKGLEWVSGISGSGGFTYYADSVKGRFTISRDNSKNTLYLQMNSLRAEDTAVYYCAKPPRGYNYGPFDYWGQGTLVTVSSASTKGPSVFPLAPCSRSTSESTAALGCLVKDYFPEPVTVSWNSGALTSGVHTFPAVLQSSGLYSLSSVVTVPSSSLGTKTYTCNVDHKPSNTKVDKRVESKYGPPCPPCPAPEFLGGPSVFLFPPKPKDTLMISRTPEVTCVVVDVSQEDPEVQFNWYVDGVEVHNAKTKPREEQFNSTYRVVSVLTVLHQDWLNGKEYKCKVSNKGLPSSIEKTISKAKGQPREPQVYTLPPSQEEMTKNQVSLTCLVKGFYPSDIAVEWESNGQPENNYKTTPPVLDSDGSFFLYSRLTVDKSRWQEGNVFSCSVMHEALHNHYTQKSLSLSLGAGGGGSGGGGSGGGGSGGGGSGAPLKIQAYFNETADLPCQFANSQNVSLSELVVFWQDQENLVLNEVYLGKEKFDSVHSKYMGRTSFDSDSWTLRLHNLQIKDKGLYQCIIIHKKPTGMIRIHQMNSELSVLANFSQPEIVPISNITENVYINLTCSSIHGYPEPKKMSVLLRTKNSTIEYDGVMQKSQDNVTELYDVSISLSVSFPDVTSNMTIFCILETDKTRLLSSPFSIELEDPQPPPDHIP

SEQ ID NO: 440 - protein, 693 aa, synthetic construct
  REGION 1..693: note = sugemalimab antibody heavy chain -CD86 ECD-Q25F/H90I
EVQLLESGGGLVQPGGSLRLSCAASGFTFSSYAMSWVRQAPGKGLEWVSGISGSGGFTYYADSVKGRFTISRDNSKNTLYLQMNSLRAEDTAVYYCAKPPRGYNYGPFDYWGQGTLVTVSSASTKGPSVFPLAPCSRSTSESTAALGCLVKDYFPEPVTVSWNSGALTSGVHTFPAVLQSSGLYSLSSVVTVPSSSLGTKTYTCNVDHKPSNTKVDKRVESKYGPPCPPCPAPEFLGGPSVFLFPPKPKDTLMISRTPEVTCVVVDVSQEDPEVQFNWYVDGVEVHNAKTKPREEQFNSTYRVVSVLTVLHQDWLNGKEYKCKVSNKGLPSSIEKTISKAKGQPREPQVYTLPPSQEEMTKNQVSLTCLVKGFYPSDIAVEWESNGQPENNYKTTPPVLDSDGSFFLYSRLTVDKSRWQEGNVFSCSVMHEALHNHYTQKSLSLSLGAGGGGSGGGGSGGGGSGGGGSGAPLKIQAYFNETADLPCQFANSQNFSLSELVVFWQDQENLVLNEVYLGKEKFDSVHSKYMGRTSFDSDSWTLRLHNLQIKDKGLYQCIIIHKKPTGMIRIHQMNSELSVLANFSQPEIVPISNITENVYINLTCSSIHGYPEPKKMSVLLRTKNSTIEYDGVMQKSQDNVTELYDVSISLSVSFPDVTSNMTIFCILETDKTRLLSSPFSIELEDPQPPPDHIP

SEQ ID NO: 441 - protein, 693 aa, synthetic construct
  REGION 1..693: note = sugemalimab antibody heavy chain -CD86 ECD-Q25F/H90V
EVQLLESGGGLVQPGGSLRLSCAASGFTFSSYAMSWVRQAPGKGLEWVSGISGSGGFTYYADSVKGRFTISRDNSKNTLYLQMNSLRAEDTAVYYCAKPPRGYNYGPFDYWGQGTLVTVSSASTKGPSVFPLAPCSRSTSESTAALGCLVKDYFPEPVTVSWNSGALTSGVHTFPAVLQSSGLYSLSSVVTVPSSSLGTKTYTCNVDHKPSNTKVDKRVESKYGPPCPPCPAPEFLGGPSVFLFPPKPKDTLMISRTPEVTCVVVDVSQEDPEVQFNWYVDGVEVHNAKTKPREEQFNSTYRVVSVLTVLHQDWLNGKEYKCKVSNKGLPSSIEKTISKAKGQPREPQVYTLPPSQEEMTKNQVSLTCLVKGFYPSDIAVEWESNGQPENNYKTTPPVLDSDGSFFLYSRLTVDKSRWQEGNVFSCSVMHEALHNHYTQKSLSLSLGAGGGGSGGGGSGGGGSGGGGSGAPLKIQAYFNETADLPCQFANSQNFSLSELVVFWQDQENLVLNEVYLGKEKFDSVHSKYMGRTSFDSDSWTLRLHNLQIKDKGLYQCIIVHKKPTGMIRIHQMNSELSVLANFSQPEIVPISNITENVYINLTCSSIHGYPEPKKMSVLLRTKNSTIEYDGVMQKSQDNVTELYDVSISLSVSFPDVTSNMTIFCILETDKTRLLSSPFSIELEDPQPPPDHIP

SEQ ID NO: 442 - protein, 693 aa, synthetic construct
  REGION 1..693: note = sugemalimab antibody heavy chain -CD86 ECD-A13F/Q25I/F33L/H90I
EVQLLESGGGLVQPGGSLRLSCAASGFTFSSYAMSWVRQAPGKGLEWVSGISGSGGFTYYADSVKGRFTISRDNSKNTLYLQMNSLRAEDTAVYYCAKPPRGYNYGPFDYWGQGTLVTVSSASTKGPSVFPLAPCSRSTSESTAALGCLVKDYFPEPVTVSWNSGALTSGVHTFPAVLQSSGLYSLSSVVTVPSSSLGTKTYTCNVDHKPSNTKVDKRVESKYGPPCPPCPAPEFLGGPSVFLFPPKPKDTLMISRTPEVTCVVVDVSQEDPEVQFNWYVDGVEVHNAKTKPREEQFNSTYRVVSVLTVLHQDWLNGKEYKCKVSNKGLPSSIEKTISKAKGQPREPQVYTLPPSQEEMTKNQVSLTCLVKGFYPSDIAVEWESNGQPENNYKTTPPVLDSDGSFFLYSRLTVDKSRWQEGNVFSCSVMHEALHNHYTQKSLSLSLGAGGGGSGGGGSGGGGSGGGGSGAPLKIQAYFNETFDLPCQFANSQNISLSELVVLWQDQENLVLNEVYLGKEKFDSVHSKYMGRTSFDSDSWTLRLHNLQIKDKGLYQCIIIHKKPTGMIRIHQMNSELSVLANFSQPEIVPISNITENVYINLTCSSIHGYPEPKKMSVLLRTKNSTIEYDGVMQKSQDNVTELYDVSISLSVSFPDVTSNMTIFCILETDKTRLLSSPFSIELEDPQPPPDHIP

SEQ ID NO: 443 - protein, 693 aa, synthetic construct
  REGION 1..693: note = sugemalimab antibody heavy chain -CD86 ECD-A13M/Q25I/F33L/H90I
EVQLLESGGGLVQPGGSLRLSCAASGFTFSSYAMSWVRQAPGKGLEWVSGISGSGGFTYYADSVKGRFTISRDNSKNTLYLQMNSLRAEDTAVYYCAKPPRGYNYGPFDYWGQGTLVTVSSASTKGPSVFPLAPCSRSTSESTAALGCLVKDYFPEPVTVSWNSGALTSGVHTFPAVLQSSGLYSLSSVVTVPSSSLGTKTYTCNVDHKPSNTKVDKRVESKYGPPCPPCPAPEFLGGPSVFLFPPKPKDTLMISRTPEVTCVVVDVSQEDPEVQFNWYVDGVEVHNAKTKPREEQFNSTYRVVSVLTVLHQDWLNGKEYKCKVSNKGLPSSIEKTISKAKGQPREPQVYTLPPSQEEMTKNQVSLTCLVKGFYPSDIAVEWESNGQPENNYKTTPPVLDSDGSFFLYSRLTVDKSRWQEGNVFSCSVMHEALHNHYTQKSLSLSLGAGGGGSGGGGSGGGGSGGGGSGAPLKIQAYFNETMDLPCQFANSQNISLSELVVLWQDQENLVLNEVYLGKEKFDSVHSKYMGRTSFDSDSWTLRLHNLQIKDKGLYQCIIIHKKPTGMIRIHQMNSELSVLANFSQPEIVPISNITENVYINLTCSSIHGYPEPKKMSVLLRTKNSTIEYDGVMQKSQDNVTELYDVSISLSVSFPDVTSNMTIFCILETDKTRLLSSPFSIELEDPQPPPDHIP

SEQ ID NO: 444 - protein, 693 aa, synthetic construct
  REGION 1..693: note = sugemalimab antibody heavy chain -CD86 ECD-Q25A/F33L/H90I
EVQLLESGGGLVQPGGSLRLSCAASGFTFSSYAMSWVRQAPGKGLEWVSGISGSGGFTYYADSVKGRFTISRDNSKNTLYLQMNSLRAEDTAVYYCAKPPRGYNYGPFDYWGQGTLVTVSSASTKGPSVFPLAPCSRSTSESTAALGCLVKDYFPEPVTVSWNSGALTSGVHTFPAVLQSSGLYSLSSVVTVPSSSLGTKTYTCNVDHKPSNTKVDKRVESKYGPPCPPCPAPEFLGGPSVFLFPPKPKDTLMISRTPEVTCVVVDVSQEDPEVQFNWYVDGVEVHNAKTKPREEQFNSTYRVVSVLTVLHQDWLNGKEYKCKVSNKGLPSSIEKTISKAKGQPREPQVYTLPPSQEEMTKNQVSLTCLVKGFYPSDIAVEWESNGQPENNYKTTPPVLDSDGSFFLYSRLTVDKSRWQEGNVFSCSVMHEALHNHYTQKSLSLSLGAGGGGSGGGGSGGGGSGGGGSGAPLKIQAYFNETADLPCQFANSQNASLSELVVLWQDQENLVLNEVYLGKEKFDSVHSKYMGRTSFDSDSWTLRLHNLQIKDKGLYQCIIIHKKPTGMIRIHQMNSELSVLANFSQPEIVPISNITENVYINLTCSSIHGYPEPKKMSVLLRTKNSTIEYDGVMQKSQDNVTELYDVSISLSVSFPDVTSNMTIFCILETDKTRLLSSPFSIELEDPQPPPDHIP

SEQ ID NO: 445 - protein, 693 aa, synthetic construct
  REGION 1..693: note = sugemalimab antibody heavy chain -CD86 ECD-Q25M/F33L/H90I
EVQLLESGGGLVQPGGSLRLSCAASGFTFSSYAMSWVRQAPGKGLEWVSGISGSGGFTYYADSVKGRFTISRDNSKNTLYLQMNSLRAEDTAVYYCAKPPRGYNYGPFDYWGQGTLVTVSSASTKGPSVFPLAPCSRSTSESTAALGCLVKDYFPEPVTVSWNSGALTSGVHTFPAVLQSSGLYSLSSVVTVPSSSLGTKTYTCNVDHKPSNTKVDKRVESKYGPPCPPCPAPEFLGGPSVFLFPPKPKDTLMISRTPEVTCVVVDVSQEDPEVQFNWYVDGVEVHNAKTKPREEQFNSTYRVVSVLTVLHQDWLNGKEYKCKVSNKGLPSSIEKTISKAKGQPREPQVYTLPPSQEEMTKNQVSLTCLVKGFYPSDIAVEWESNGQPENNYKTTPPVLDSDGSFFLYSRLTVDKSRWQEGNVFSCSVMHEALHNHYTQKSLSLSLGAGGGGSGGGGSGGGGSGGGGSGAPLKIQAYFNETADLPCQFANSQNMSLSELVVLWQDQENLVLNEVYLGKEKFDSVHSKYMGRTSFDSDSWTLRLHNLQIKDKGLYQCIIIHKKPTGMIRIHQMNSELSVLANFSQPEIVPISNITENVYINLTCSSIHGYPEPKKMSVLLRTKNSTIEYDGVMQKSQDNVTELYDVSISLSVSFPDVTSNMTIFCILETDKTRLLSSPFSIELEDPQPPPDHIP

SEQ ID NO: 446 - protein, 693 aa, synthetic construct
  REGION 1..693: note = sugemalimab antibody heavy chain -CD86 ECD-Q25I/F33M/H90I
EVQLLESGGGLVQPGGSLRLSCAASGFTFSSYAMSWVRQAPGKGLEWVSGISGSGGFTYYADSVKGRFTISRDNSKNTLYLQMNSLRAEDTAVYYCAKPPRGYNYGPFDYWGQGTLVTVSSASTKGPSVFPLAPCSRSTSESTAALGCLVKDYFPEPVTVSWNSGALTSGVHTFPAVLQSSGLYSLSSVVTVPSSSLGTKTYTCNVDHKPSNTKVDKRVESKYGPPCPPCPAPEFLGGPSVFLFPPKPKDTLMISRTPEVTCVVVDVSQEDPEVQFNWYVDGVEVHNAKTKPREEQFNSTYRVVSVLTVLHQDWLNGKEYKCKVSNKGLPSSIEKTISKAKGQPREPQVYTLPPSQEEMTKNQVSLTCLVKGFYPSDIAVEWESNGQPENNYKTTPPVLDSDGSFFLYSRLTVDKSRWQEGNVFSCSVMHEALHNHYTQKSLSLSLGAGGGGSGGGGSGGGGSGGGGSGAPLKIQAYFNETADLPCQFANSQNISLSELVVMWQDQENLVLNEVYLGKEKFDSVHSKYMGRTSFDSDSWTLRLHNLQIKDKGLYQCIIIHKKPTGMIRIHQMNSELSVLANFSQPEIVPISNITENVYINLTCSSIHGYPEPKKMSVLLRTKNSTIEYDGVMQKSQDNVTELYDVSISLSVSFPDVTSNMTIFCILETDKTRLLSSPFSIELEDPQPPPDHIP

SEQ ID NO: 447 - protein, 693 aa, synthetic construct
  REGION 1..693: note = sugemalimab antibody heavy chain -CD86 ECD-Q25I/F33L/I89V/H90I
EVQLLESGGGLVQPGGSLRLSCAASGFTFSSYAMSWVRQAPGKGLEWVSGISGSGGFTYYADSVKGRFTISRDNSKNTLYLQMNSLRAEDTAVYYCAKPPRGYNYGPFDYWGQGTLVTVSSASTKGPSVFPLAPCSRSTSESTAALGCLVKDYFPEPVTVSWNSGALTSGVHTFPAVLQSSGLYSLSSVVTVPSSSLGTKTYTCNVDHKPSNTKVDKRVESKYGPPCPPCPAPEFLGGPSVFLFPPKPKDTLMISRTPEVTCVVVDVSQEDPEVQFNWYVDGVEVHNAKTKPREEQFNSTYRVVSVLTVLHQDWLNGKEYKCKVSNKGLPSSIEKTISKAKGQPREPQVYTLPPSQEEMTKNQVSLTCLVKGFYPSDIAVEWESNGQPENNYKTTPPVLDSDGSFFLYSRLTVDKSRWQEGNVFSCSVMHEALHNHYTQKSLSLSLGAGGGGSGGGGSGGGGSGGGGSGAPLKIQAYFNETADLPCQFANSQNISLSELVVLWQDQENLVLNEVYLGKEKFDSVHSKYMGRTSFDSDSWTLRLHNLQIKDKGLYQCIVIHKKPTGMIRIHQMNSELSVLANFSQPEIVPISNITENVYINLTCSSIHGYPEPKKMSVLLRTKNSTIEYDGVMQKSQDNVTELYDVSISLSVSFPDVTSNMTIFCILETDKTRLLSSPFSIELEDPQPPPDHIP

SEQ ID NO: 448 - protein, 693 aa, synthetic construct
  REGION 1..693: note = sugemalimab antibody heavy chain -CD86 ECD-Q25I/F33L/I89F/H90I
EVQLLESGGGLVQPGGSLRLSCAASGFTFSSYAMSWVRQAPGKGLEWVSGISGSGGFTYYADSVKGRFTISRDNSKNTLYLQMNSLRAEDTAVYYCAKPPRGYNYGPFDYWGQGTLVTVSSASTKGPSVFPLAPCSRSTSESTAALGCLVKDYFPEPVTVSWNSGALTSGVHTFPAVLQSSGLYSLSSVVTVPSSSLGTKTYTCNVDHKPSNTKVDKRVESKYGPPCPPCPAPEFLGGPSVFLFPPKPKDTLMISRTPEVTCVVVDVSQEDPEVQFNWYVDGVEVHNAKTKPREEQFNSTYRVVSVLTVLHQDWLNGKEYKCKVSNKGLPSSIEKTISKAKGQPREPQVYTLPPSQEEMTKNQVSLTCLVKGFYPSDIAVEWESNGQPENNYKTTPPVLDSDGSFFLYSRLTVDKSRWQEGNVFSCSVMHEALHNHYTQKSLSLSLGAGGGGSGGGGSGGGGSGGGGSGAPLKIQAYFNETADLPCQFANSQNISLSELVVLWQDQENLVLNEVYLGKEKFDSVHSKYMGRTSFDSDSWTLRLHNLQIKDKGLYQCIFIHKKPTGMIRIHQMNSELSVLANFSQPEIVPISNITENVYINLTCSSIHGYPEPKKMSVLLRTKNSTIEYDGVMQKSQDNVTELYDVSISLSVSFPDVTSNMTIFCILETDKTRLLSSPFSIELEDPQPPPDHIP

SEQ ID NO: 449 - protein, 693 aa, synthetic construct
  REGION 1..693: note = sugemalimab antibody heavy chain -CD86 ECD-Q25I/F33L/I89M/H90I
EVQLLESGGGLVQPGGSLRLSCAASGFTFSSYAMSWVRQAPGKGLEWVSGISGSGGFTYYADSVKGRFTISRDNSKNTLYLQMNSLRAEDTAVYYCAKPPRGYNYGPFDYWGQGTLVTVSSASTKGPSVFPLAPCSRSTSESTAALGCLVKDYFPEPVTVSWNSGALTSGVHTFPAVLQSSGLYSLSSVVTVPSSSLGTKTYTCNVDHKPSNTKVDKRVESKYGPPCPPCPAPEFLGGPSVFLFPPKPKDTLMISRTPEVTCVVVDVSQEDPEVQFNWYVDGVEVHNAKTKPREEQFNSTYRVVSVLTVLHQDWLNGKEYKCKVSNKGLPSSIEKTISKAKGQPREPQVYTLPPSQEEMTKNQVSLTCLVKGFYPSDIAVEWESNGQPENNYKTTPPVLDSDGSFFLYSRLTVDKSRWQEGNVFSCSVMHEALHNHYTQKSLSLSLGAGGGGSGGGGSGGGGSGGGGSGAPLKIQAYFNETADLPCQFANSQNISLSELVVLWQDQENLVLNEVYLGKEKFDSVHSKYMGRTSFDSDSWTLRLHNLQIKDKGLYQCIMIHKKPTGMIRIHQMNSELSVLANFSQPEIVPISNITENVYINLTCSSIHGYPEPKKMSVLLRTKNSTIEYDGVMQKSQDNVTELYDVSISLSVSFPDVTSNMTIFCILETDKTRLLSSPFSIELEDPQPPPDHIP

SEQ ID NO: 450 - protein, 693 aa, synthetic construct
  REGION 1..693: note = sugemalimab antibody heavy chain -CD86 ECD-Q25I/F33L/H90M
EVQLLESGGGLVQPGGSLRLSCAASGFTFSSYAMSWVRQAPGKGLEWVSGISGSGGFTYYADSVKGRFTISRDNSKNTLYLQMNSLRAEDTAVYYCAKPPRGYNYGPFDYWGQGTLVTVSSASTKGPSVFPLAPCSRSTSESTAALGCLVKDYFPEPVTVSWNSGALTSGVHTFPAVLQSSGLYSLSSVVTVPSSSLGTKTYTCNVDHKPSNTKVDKRVESKYGPPCPPCPAPEFLGGPSVFLFPPKPKDTLMISRTPEVTCVVVDVSQEDPEVQFNWYVDGVEVHNAKTKPREEQFNSTYRVVSVLTVLHQDWLNGKEYKCKVSNKGLPSSIEKTISKAKGQPREPQVYTLPPSQEEMTKNQVSLTCLVKGFYPSDIAVEWESNGQPENNYKTTPPVLDSDGSFFLYSRLTVDKSRWQEGNVFSCSVMHEALHNHYTQKSLSLSLGAGGGGSGGGGSGGGGSGGGGSGAPLKIQAYFNETADLPCQFANSQNISLSELVVLWQDQENLVLNEVYLGKEKFDSVHSKYMGRTSFDSDSWTLRLHNLQIKDKGLYQCIIMHKKPTGMIRIHQMNSELSVLANFSQPEIVPISNITENVYINLTCSSIHGYPEPKKMSVLLRTKNSTIEYDGVMQKSQDNVTELYDVSISLSVSFPDVTSNMTIFCILETDKTRLLSSPFSIELEDPQPPPDHIP

SEQ ID NO: 451 - protein, 694 aa, synthetic construct
  REGION 1..694: note = CD86 ECD-Q25I/F33L/H90I-sugemalimab antibody heavy chain
APLKIQAYFNETADLPCQFANSQNISLSELVVLWQDQENLVLNEVYLGKEKFDSVHSKYMGRTSFDSDSWTLRLHNLQIKDKGLYQCIIIHKKPTGMIRIHQMNSELSVLANFSQPEIVPISNITENVYINLTCSSIHGYPEPKKMSVLLRTKNSTIEYDGVMQKSQDNVTELYDVSISLSVSFPDVTSNMTIFCILETDKTRLLSSPFSIELEDPQPPPDHIPAGGGGSGGGGSGGGGSGGGGSGEVQLLESGGGLVQPGGSLRLSCAASGFTFSSYAMSWVRQAPGKGLEWVSGISGSGGFTYYADSVKGRFTISRDNSKNTLYLQMNSLRAEDTAVYYCAKPPRGYNYGPFDYWGQGTLVTVSSASTKGPSVFPLAPCSRSTSESTAALGCLVKDYFPEPVTVSWNSGALTSGVHTFPAVLQSSGLYSLSSVVTVPSSSLGTKTYTCNVDHKPSNTKVDKRVESKYGPPCPPCPAPEFLGGPSVFLFPPKPKDTLMISRTPEVTCVVVDVSQEDPEVQFNWYVDGVEVHNAKTKPREEQFNSTYRVVSVLTVLHQDWLNGKEYKCKVSNKGLPSSIEKTISKAKGQPREPQVYTLPPSQEEMTKNQVSLTCLVKGFYPSDIAVEWESNGQPENNYKTTPPVLDSDGSFFLYSRLTVDKSRWQEGNVFSCSVMHEALHNHYTQKSLSLSLGK

SEQ ID NO: 452 - protein, 694 aa, synthetic construct
  REGION 1..694: note = CD86 ECD-Q25V/F33L/H90I-sugemalimab antibody heavy chain
APLKIQAYFNETADLPCQFANSQNVSLSELVVLWQDQENLVLNEVYLGKEKFDSVHSKYMGRTSFDSDSWTLRLHNLQIKDKGLYQCIIIHKKPTGMIRIHQMNSELSVLANFSQPEIVPISNITENVYINLTCSSIHGYPEPKKMSVLLRTKNSTIEYDGVMQKSQDNVTELYDVSISLSVSFPDVTSNMTIFCILETDKTRLLSSPFSIELEDPQPPPDHIPAGGGGSGGGGSGGGGSGGGGSGEVQLLESGGGLVQPGGSLRLSCAASGFTFSSYAMSWVRQAPGKGLEWVSGISGSGGFTYYADSVKGRFTISRDNSKNTLYLQMNSLRAEDTAVYYCAKPPRGYNYGPFDYWGQGTLVTVSSASTKGPSVFPLAPCSRSTSESTAALGCLVKDYFPEPVTVSWNSGALTSGVHTFPAVLQSSGLYSLSSVVTVPSSSLGTKTYTCNVDHKPSNTKVDKRVESKYGPPCPPCPAPEFLGGPSVFLFPPKPKDTLMISRTPEVTCVVVDVSQEDPEVQFNWYVDGVEVHNAKTKPREEQFNSTYRVVSVLTVLHQDWLNGKEYKCKVSNKGLPSSIEKTISKAKGQPREPQVYTLPPSQEEMTKNQVSLTCLVKGFYPSDIAVEWESNGQPENNYKTTPPVLDSDGSFFLYSRLTVDKSRWQEGNVFSCSVMHEALHNHYTQKSLSLSLGK

SEQ ID NO: 453 - protein, 694 aa, synthetic construct
  REGION 1..694: note = CD86 ECD-Q25I/F33V/H90I-sugemalimab antibody heavy chain
APLKIQAYFNETADLPCQFANSQNISLSELVVVWQDQENLVLNEVYLGKEKFDSVHSKYMGRTSFDSDSWTLRLHNLQIKDKGLYQCIIIHKKPTGMIRIHQMNSELSVLANFSQPEIVPISNITENVYINLTCSSIHGYPEPKKMSVLLRTKNSTIEYDGVMQKSQDNVTELYDVSISLSVSFPDVTSNMTIFCILETDKTRLLSSPFSIELEDPQPPPDHIPAGGGGSGGGGSGGGGSGGGGSGEVQLLESGGGLVQPGGSLRLSCAASGFTFSSYAMSWVRQAPGKGLEWVSGISGSGGFTYYADSVKGRFTISRDNSKNTLYLQMNSLRAEDTAVYYCAKPPRGYNYGPFDYWGQGTLVTVSSASTKGPSVFPLAPCSRSTSESTAALGCLVKDYFPEPVTVSWNSGALTSGVHTFPAVLQSSGLYSLSSVVTVPSSSLGTKTYTCNVDHKPSNTKVDKRVESKYGPPCPPCPAPEFLGGPSVFLFPPKPKDTLMISRTPEVTCVVVDVSQEDPEVQFNWYVDGVEVHNAKTKPREEQFNSTYRVVSVLTVLHQDWLNGKEYKCKVSNKGLPSSIEKTISKAKGQPREPQVYTLPPSQEEMTKNQVSLTCLVKGFYPSDIAVEWESNGQPENNYKTTPPVLDSDGSFFLYSRLTVDKSRWQEGNVFSCSVMHEALHNHYTQKSLSLSLGK

SEQ ID NO: 454 - protein, 694 aa, synthetic construct
  REGION 1..694: note = CD86 ECD-Q25V/F33V/H90I-sugemalimab antibody heavy chain
APLKIQAYFNETADLPCQFANSQNVSLSELVVVWQDQENLVLNEVYLGKEKFDSVHSKYMGRTSFDSDSWTLRLHNLQIKDKGLYQCIIIHKKPTGMIRIHQMNSELSVLANFSQPEIVPISNITENVYINLTCSSIHGYPEPKKMSVLLRTKNSTIEYDGVMQKSQDNVTELYDVSISLSVSFPDVTSNMTIFCILETDKTRLLSSPFSIELEDPQPPPDHIPAGGGGSGGGGSGGGGSGGGGSGEVQLLESGGGLVQPGGSLRLSCAASGFTFSSYAMSWVRQAPGKGLEWVSGISGSGGFTYYADSVKGRFTISRDNSKNTLYLQMNSLRAEDTAVYYCAKPPRGYNYGPFDYWGQGTLVTVSSASTKGPSVFPLAPCSRSTSESTAALGCLVKDYFPEPVTVSWNSGALTSGVHTFPAVLQSSGLYSLSSVVTVPSSSLGTKTYTCNVDHKPSNTKVDKRVESKYGPPCPPCPAPEFLGGPSVFLFPPKPKDTLMISRTPEVTCVVVDVSQEDPEVQFNWYVDGVEVHNAKTKPREEQFNSTYRVVSVLTVLHQDWLNGKEYKCKVSNKGLPSSIEKTISKAKGQPREPQVYTLPPSQEEMTKNQVSLTCLVKGFYPSDIAVEWESNGQPENNYKTTPPVLDSDGSFFLYSRLTVDKSRWQEGNVFSCSVMHEALHNHYTQKSLSLSLGK

SEQ ID NO: 455 - protein, 694 aa, synthetic construct
  REGION 1..694: note = CD86 ECD-Q25I/F33L/H90V-sugemalimab antibody heavy chain
APLKIQAYFNETADLPCQFANSQNISLSELVVLWQDQENLVLNEVYLGKEKFDSVHSKYMGRTSFDSDSWTLRLHNLQIKDKGLYQCIIVHKKPTGMIRIHQMNSELSVLANFSQPEIVPISNITENVYINLTCSSIHGYPEPKKMSVLLRTKNSTIEYDGVMQKSQDNVTELYDVSISLSVSFPDVTSNMTIFCILETDKTRLLSSPFSIELEDPQPPPDHIPAGGGGSGGGGSGGGGSGGGGSGEVQLLESGGGLVQPGGSLRLSCAASGFTFSSYAMSWVRQAPGKGLEWVSGISGSGGFTYYADSVKGRFTISRDNSKNTLYLQMNSLRAEDTAVYYCAKPPRGYNYGPFDYWGQGTLVTVSSASTKGPSVFPLAPCSRSTSESTAALGCLVKDYFPEPVTVSWNSGALTSGVHTFPAVLQSSGLYSLSSVVTVPSSSLGTKTYTCNVDHKPSNTKVDKRVESKYGPPCPPCPAPEFLGGPSVFLFPPKPKDTLMISRTPEVTCVVVDVSQEDPEVQFNWYVDGVEVHNAKTKPREEQFNSTYRVVSVLTVLHQDWLNGKEYKCKVSNKGLPSSIEKTISKAKGQPREPQVYTLPPSQEEMTKNQVSLTCLVKGFYPSDIAVEWESNGQPENNYKTTPPVLDSDGSFFLYSRLTVDKSRWQEGNVFSCSVMHEALHNHYTQKSLSLSLGK

SEQ ID NO: 456 - protein, 694 aa, synthetic construct
  REGION 1..694: note = CD86 ECD-Q25V/F33L/H90V-sugemalimab antibody heavy chain
APLKIQAYFNETADLPCQFANSQNVSLSELVVLWQDQENLVLNEVYLGKEKFDSVHSKYMGRTSFDSDSWTLRLHNLQIKDKGLYQCIIVHKKPTGMIRIHQMNSELSVLANFSQPEIVPISNITENVYINLTCSSIHGYPEPKKMSVLLRTKNSTIEYDGVMQKSQDNVTELYDVSISLSVSFPDVTSNMTIFCILETDKTRLLSSPFSIELEDPQPPPDHIPAGGGGSGGGGSGGGGSGGGGSGEVQLLESGGGLVQPGGSLRLSCAASGFTFSSYAMSWVRQAPGKGLEWVSGISGSGGFTYYADSVKGRFTISRDNSKNTLYLQMNSLRAEDTAVYYCAKPPRGYNYGPFDYWGQGTLVTVSSASTKGPSVFPLAPCSRSTSESTAALGCLVKDYFPEPVTVSWNSGALTSGVHTFPAVLQSSGLYSLSSVVTVPSSSLGTKTYTCNVDHKPSNTKVDKRVESKYGPPCPPCPAPEFLGGPSVFLFPPKPKDTLMISRTPEVTCVVVDVSQEDPEVQFNWYVDGVEVHNAKTKPREEQFNSTYRVVSVLTVLHQDWLNGKEYKCKVSNKGLPSSIEKTISKAKGQPREPQVYTLPPSQEEMTKNQVSLTCLVKGFYPSDIAVEWESNGQPENNYKTTPPVLDSDGSFFLYSRLTVDKSRWQEGNVFSCSVMHEALHNHYTQKSLSLSLGK

SEQ ID NO: 457 - protein, 694 aa, synthetic construct
  REGION 1..694: note = CD86 ECD-Q25I/F33V/H90V-sugemalimab antibody heavy chain
APLKIQAYFNETADLPCQFANSQNISLSELVVVWQDQENLVLNEVYLGKEKFDSVHSKYMGRTSFDSDSWTLRLHNLQIKDKGLYQCIIVHKKPTGMIRIHQMNSELSVLANFSQPEIVPISNITENVYINLTCSSIHGYPEPKKMSVLLRTKNSTIEYDGVMQKSQDNVTELYDVSISLSVSFPDVTSNMTIFCILETDKTRLLSSPFSIELEDPQPPPDHIPAGGGGSGGGGSGGGGSGGGGSGEVQLLESGGGLVQPGGSLRLSCAASGFTFSSYAMSWVRQAPGKGLEWVSGISGSGGFTYYADSVKGRFTISRDNSKNTLYLQMNSLRAEDTAVYYCAKPPRGYNYGPFDYWGQGTLVTVSSASTKGPSVFPLAPCSRSTSESTAALGCLVKDYFPEPVTVSWNSGALTSGVHTFPAVLQSSGLYSLSSVVTVPSSSLGTKTYTCNVDHKPSNTKVDKRVESKYGPPCPPCPAPEFLGGPSVFLFPPKPKDTLMISRTPEVTCVVVDVSQEDPEVQFNWYVDGVEVHNAKTKPREEQFNSTYRVVSVLTVLHQDWLNGKEYKCKVSNKGLPSSIEKTISKAKGQPREPQVYTLPPSQEEMTKNQVSLTCLVKGFYPSDIAVEWESNGQPENNYKTTPPVLDSDGSFFLYSRLTVDKSRWQEGNVFSCSVMHEALHNHYTQKSLSLSLGK

SEQ ID NO: 458 - protein, 694 aa, synthetic construct
  REGION 1..694: note = CD86 ECD-Q25V/F33V/H90V-sugemalimab antibody heavy chain
APLKIQAYFNETADLPCQFANSQNVSLSELVVVWQDQENLVLNEVYLGKEKFDSVHSKYMGRTSFDSDSWTLRLHNLQIKDKGLYQCIIVHKKPTGMIRIHQMNSELSVLANFSQPEIVPISNITENVYINLTCSSIHGYPEPKKMSVLLRTKNSTIEYDGVMQKSQDNVTELYDVSISLSVSFPDVTSNMTIFCILETDKTRLLSSPFSIELEDPQPPPDHIPAGGGGSGGGGSGGGGSGGGGSGEVQLLESGGGLVQPGGSLRLSCAASGFTFSSYAMSWVRQAPGKGLEWVSGISGSGGFTYYADSVKGRFTISRDNSKNTLYLQMNSLRAEDTAVYYCAKPPRGYNYGPFDYWGQGTLVTVSSASTKGPSVFPLAPCSRSTSESTAALGCLVKDYFPEPVTVSWNSGALTSGVHTFPAVLQSSGLYSLSSVVTVPSSSLGTKTYTCNVDHKPSNTKVDKRVESKYGPPCPPCPAPEFLGGPSVFLFPPKPKDTLMISRTPEVTCVVVDVSQEDPEVQFNWYVDGVEVHNAKTKPREEQFNSTYRVVSVLTVLHQDWLNGKEYKCKVSNKGLPSSIEKTISKAKGQPREPQVYTLPPSQEEMTKNQVSLTCLVKGFYPSDIAVEWESNGQPENNYKTTPPVLDSDGSFFLYSRLTVDKSRWQEGNVFSCSVMHEALHNHYTQKSLSLSLGK

SEQ ID NO: 459 - protein, 694 aa, synthetic construct
  REGION 1..694: note = CD86 ECD-A13L/Q25I/F33L/H90I-sugemalimab antibody heavy chain
APLKIQAYFNETLDLPCQFANSQNISLSELVVLWQDQENLVLNEVYLGKEKFDSVHSKYMGRTSFDSDSWTLRLHNLQIKDKGLYQCIIIHKKPTGMIRIHQMNSELSVLANFSQPEIVPISNITENVYINLTCSSIHGYPEPKKMSVLLRTKNSTIEYDGVMQKSQDNVTELYDVSISLSVSFPDVTSNMTIFCILETDKTRLLSSPFSIELEDPQPPPDHIPAGGGGSGGGGSGGGGSGGGGSGEVQLLESGGGLVQPGGSLRLSCAASGFTFSSYAMSWVRQAPGKGLEWVSGISGSGGFTYYADSVKGRFTISRDNSKNTLYLQMNSLRAEDTAVYYCAKPPRGYNYGPFDYWGQGTLVTVSSASTKGPSVFPLAPCSRSTSESTAALGCLVKDYFPEPVTVSWNSGALTSGVHTFPAVLQSSGLYSLSSVVTVPSSSLGTKTYTCNVDHKPSNTKVDKRVESKYGPPCPPCPAPEFLGGPSVFLFPPKPKDTLMISRTPEVTCVVVDVSQEDPEVQFNWYVDGVEVHNAKTKPREEQFNSTYRVVSVLTVLHQDWLNGKEYKCKVSNKGLPSSIEKTISKAKGQPREPQVYTLPPSQEEMTKNQVSLTCLVKGFYPSDIAVEWESNGQPENNYKTTPPVLDSDGSFFLYSRLTVDKSRWQEGNVFSCSVMHEALHNHYTQKSLSLSLGK

SEQ ID NO: 460 - protein, 694 aa, synthetic construct
  REGION 1..694: note = CD86 ECD-A13I/Q25I/F33L/H90I-sugemalimab antibody heavy chain
APLKIQAYFNETIDLPCQFANSQNISLSELVVLWQDQENLVLNEVYLGKEKFDSVHSKYMGRTSFDSDSWTLRLHNLQIKDKGLYQCIIIHKKPTGMIRIHQMNSELSVLANFSQPEIVPISNITENVYINLTCSSIHGYPEPKKMSVLLRTKNSTIEYDGVMQKSQDNVTELYDVSISLSVSFPDVTSNMTIFCILETDKTRLLSSPFSIELEDPQPPPDHIPAGGGGSGGGGSGGGGSGGGGSGEVQLLESGGGLVQPGGSLRLSCAASGFTFSSYAMSWVRQAPGKGLEWVSGISGSGGFTYYADSVKGRFTISRDNSKNTLYLQMNSLRAEDTAVYYCAKPPRGYNYGPFDYWGQGTLVTVSSASTKGPSVFPLAPCSRSTSESTAALGCLVKDYFPEPVTVSWNSGALTSGVHTFPAVLQSSGLYSLSSVVTVPSSSLGTKTYTCNVDHKPSNTKVDKRVESKYGPPCPPCPAPEFLGGPSVFLFPPKPKDTLMISRTPEVTCVVVDVSQEDPEVQFNWYVDGVEVHNAKTKPREEQFNSTYRVVSVLTVLHQDWLNGKEYKCKVSNKGLPSSIEKTISKAKGQPREPQVYTLPPSQEEMTKNQVSLTCLVKGFYPSDIAVEWESNGQPENNYKTTPPVLDSDGSFFLYSRLTVDKSRWQEGNVFSCSVMHEALHNHYTQKSLSLSLGK

SEQ ID NO: 461 - protein, 694 aa, synthetic construct
  REGION 1..694: note = CD86 ECD-A13L/Q25V/F33L/H90I-sugemalimab antibody heavy chain
APLKIQAYFNETLDLPCQFANSQNVSLSELVVLWQDQENLVLNEVYLGKEKFDSVHSKYMGRTSFDSDSWTLRLHNLQIKDKGLYQCIIIHKKPTGMIRIHQMNSELSVLANFSQPEIVPISNITENVYINLTCSSIHGYPEPKKMSVLLRTKNSTIEYDGVMQKSQDNVTELYDVSISLSVSFPDVTSNMTIFCILETDKTRLLSSPFSIELEDPQPPPDHIPAGGGGSGGGGSGGGGSGGGGSGEVQLLESGGGLVQPGGSLRLSCAASGFTFSSYAMSWVRQAPGKGLEWVSGISGSGGFTYYADSVKGRFTISRDNSKNTLYLQMNSLRAEDTAVYYCAKPPRGYNYGPFDYWGQGTLVTVSSASTKGPSVFPLAPCSRSTSESTAALGCLVKDYFPEPVTVSWNSGALTSGVHTFPAVLQSSGLYSLSSVVTVPSSSLGTKTYTCNVDHKPSNTKVDKRVESKYGPPCPPCPAPEFLGGPSVFLFPPKPKDTLMISRTPEVTCVVVDVSQEDPEVQFNWYVDGVEVHNAKTKPREEQFNSTYRVVSVLTVLHQDWLNGKEYKCKVSNKGLPSSIEKTISKAKGQPREPQVYTLPPSQEEMTKNQVSLTCLVKGFYPSDIAVEWESNGQPENNYKTTPPVLDSDGSFFLYSRLTVDKSRWQEGNVFSCSVMHEALHNHYTQKSLSLSLGK

SEQ ID NO: 462 - protein, 694 aa, synthetic construct
  REGION 1..694: note = CD86 ECD-A13I/Q25V/F33L/H90I-sugemalimab antibody heavy chain
APLKIQAYFNETIDLPCQFANSQNVSLSELVVLWQDQENLVLNEVYLGKEKFDSVHSKYMGRTSFDSDSWTLRLHNLQIKDKGLYQCIIIHKKPTGMIRIHQMNSELSVLANFSQPEIVPISNITENVYINLTCSSIHGYPEPKKMSVLLRTKNSTIEYDGVMQKSQDNVTELYDVSISLSVSFPDVTSNMTIFCILETDKTRLLSSPFSIELEDPQPPPDHIPAGGGGSGGGGSGGGGSGGGGSGEVQLLESGGGLVQPGGSLRLSCAASGFTFSSYAMSWVRQAPGKGLEWVSGISGSGGFTYYADSVKGRFTISRDNSKNTLYLQMNSLRAEDTAVYYCAKPPRGYNYGPFDYWGQGTLVTVSSASTKGPSVFPLAPCSRSTSESTAALGCLVKDYFPEPVTVSWNSGALTSGVHTFPAVLQSSGLYSLSSVVTVPSSSLGTKTYTCNVDHKPSNTKVDKRVESKYGPPCPPCPAPEFLGGPSVFLFPPKPKDTLMISRTPEVTCVVVDVSQEDPEVQFNWYVDGVEVHNAKTKPREEQFNSTYRVVSVLTVLHQDWLNGKEYKCKVSNKGLPSSIEKTISKAKGQPREPQVYTLPPSQEEMTKNQVSLTCLVKGFYPSDIAVEWESNGQPENNYKTTPPVLDSDGSFFLYSRLTVDKSRWQEGNVFSCSVMHEALHNHYTQKSLSLSLGK

SEQ ID NO: 463 - protein, 694 aa, synthetic construct
  REGION 1..694: note = CD86 ECD-Q25I/F33L/I89L/H90I-sugemalimab antibody heavy chain
APLKIQAYFNETADLPCQFANSQNISLSELVVLWQDQENLVLNEVYLGKEKFDSVHSKYMGRTSFDSDSWTLRLHNLQIKDKGLYQCILIHKKPTGMIRIHQMNSELSVLANFSQPEIVPISNITENVYINLTCSSIHGYPEPKKMSVLLRTKNSTIEYDGVMQKSQDNVTELYDVSISLSVSFPDVTSNMTIFCILETDKTRLLSSPFSIELEDPQPPPDHIPAGGGGSGGGGSGGGGSGGGGSGEVQLLESGGGLVQPGGSLRLSCAASGFTFSSYAMSWVRQAPGKGLEWVSGISGSGGFTYYADSVKGRFTISRDNSKNTLYLQMNSLRAEDTAVYYCAKPPRGYNYGPFDYWGQGTLVTVSSASTKGPSVFPLAPCSRSTSESTAALGCLVKDYFPEPVTVSWNSGALTSGVHTFPAVLQSSGLYSLSSVVTVPSSSLGTKTYTCNVDHKPSNTKVDKRVESKYGPPCPPCPAPEFLGGPSVFLFPPKPKDTLMISRTPEVTCVVVDVSQEDPEVQFNWYVDGVEVHNAKTKPREEQFNSTYRVVSVLTVLHQDWLNGKEYKCKVSNKGLPSSIEKTISKAKGQPREPQVYTLPPSQEEMTKNQVSLTCLVKGFYPSDIAVEWESNGQPENNYKTTPPVLDSDGSFFLYSRLTVDKSRWQEGNVFSCSVMHEALHNHYTQKSLSLSLGK

SEQ ID NO: 464 - protein, 694 aa, synthetic construct
  REGION 1..694: note = CD86 ECD-Q25I/F33L/M60R/H90I-sugemalimab antibody heavy chain
APLKIQAYFNETADLPCQFANSQNISLSELVVLWQDQENLVLNEVYLGKEKFDSVHSKYRGRTSFDSDSWTLRLHNLQIKDKGLYQCIIIHKKPTGMIRIHQMNSELSVLANFSQPEIVPISNITENVYINLTCSSIHGYPEPKKMSVLLRTKNSTIEYDGVMQKSQDNVTELYDVSISLSVSFPDVTSNMTIFCILETDKTRLLSSPFSIELEDPQPPPDHIPAGGGGSGGGGSGGGGSGGGGSGEVQLLESGGGLVQPGGSLRLSCAASGFTFSSYAMSWVRQAPGKGLEWVSGISGSGGFTYYADSVKGRFTISRDNSKNTLYLQMNSLRAEDTAVYYCAKPPRGYNYGPFDYWGQGTLVTVSSASTKGPSVFPLAPCSRSTSESTAALGCLVKDYFPEPVTVSWNSGALTSGVHTFPAVLQSSGLYSLSSVVTVPSSSLGTKTYTCNVDHKPSNTKVDKRVESKYGPPCPPCPAPEFLGGPSVFLFPPKPKDTLMISRTPEVTCVVVDVSQEDPEVQFNWYVDGVEVHNAKTKPREEQFNSTYRVVSVLTVLHQDWLNGKEYKCKVSNKGLPSSIEKTISKAKGQPREPQVYTLPPSQEEMTKNQVSLTCLVKGFYPSDIAVEWESNGQPENNYKTTPPVLDSDGSFFLYSRLTVDKSRWQEGNVFSCSVMHEALHNHYTQKSLSLSLGK

SEQ ID NO: 465 - protein, 694 aa, synthetic construct
  REGION 1..694: note = CD86 ECD-Q25V/F33L/I89L/H90I-sugemalimab antibody heavy chain
APLKIQAYFNETADLPCQFANSQNVSLSELVVLWQDQENLVLNEVYLGKEKFDSVHSKYMGRTSFDSDSWTLRLHNLQIKDKGLYQCILIHKKPTGMIRIHQMNSELSVLANFSQPEIVPISNITENVYINLTCSSIHGYPEPKKMSVLLRTKNSTIEYDGVMQKSQDNVTELYDVSISLSVSFPDVTSNMTIFCILETDKTRLLSSPFSIELEDPQPPPDHIPAGGGGSGGGGSGGGGSGGGGSGEVQLLESGGGLVQPGGSLRLSCAASGFTFSSYAMSWVRQAPGKGLEWVSGISGSGGFTYYADSVKGRFTISRDNSKNTLYLQMNSLRAEDTAVYYCAKPPRGYNYGPFDYWGQGTLVTVSSASTKGPSVFPLAPCSRSTSESTAALGCLVKDYFPEPVTVSWNSGALTSGVHTFPAVLQSSGLYSLSSVVTVPSSSLGTKTYTCNVDHKPSNTKVDKRVESKYGPPCPPCPAPEFLGGPSVFLFPPKPKDTLMISRTPEVTCVVVDVSQEDPEVQFNWYVDGVEVHNAKTKPREEQFNSTYRVVSVLTVLHQDWLNGKEYKCKVSNKGLPSSIEKTISKAKGQPREPQVYTLPPSQEEMTKNQVSLTCLVKGFYPSDIAVEWESNGQPENNYKTTPPVLDSDGSFFLYSRLTVDKSRWQEGNVFSCSVMHEALHNHYTQKSLSLSLGK

SEQ ID NO: 466 - protein, 694 aa, synthetic construct
  REGION 1..694: note = CD86 ECD-Q25V/F33L/M60R/H90I-sugemalimab antibody heavy chain
APLKIQAYFNETADLPCQFANSQNVSLSELVVLWQDQENLVLNEVYLGKEKFDSVHSKYRGRTSFDSDSWTLRLHNLQIKDKGLYQCIIIHKKPTGMIRIHQMNSELSVLANFSQPEIVPISNITENVYINLTCSSIHGYPEPKKMSVLLRTKNSTIEYDGVMQKSQDNVTELYDVSISLSVSFPDVTSNMTIFCILETDKTRLLSSPFSIELEDPQPPPDHIPAGGGGSGGGGSGGGGSGGGGSGEVQLLESGGGLVQPGGSLRLSCAASGFTFSSYAMSWVRQAPGKGLEWVSGISGSGGFTYYADSVKGRFTISRDNSKNTLYLQMNSLRAEDTAVYYCAKPPRGYNYGPFDYWGQGTLVTVSSASTKGPSVFPLAPCSRSTSESTAALGCLVKDYFPEPVTVSWNSGALTSGVHTFPAVLQSSGLYSLSSVVTVPSSSLGTKTYTCNVDHKPSNTKVDKRVESKYGPPCPPCPAPEFLGGPSVFLFPPKPKDTLMISRTPEVTCVVVDVSQEDPEVQFNWYVDGVEVHNAKTKPREEQFNSTYRVVSVLTVLHQDWLNGKEYKCKVSNKGLPSSIEKTISKAKGQPREPQVYTLPPSQEEMTKNQVSLTCLVKGFYPSDIAVEWESNGQPENNYKTTPPVLDSDGSFFLYSRLTVDKSRWQEGNVFSCSVMHEALHNHYTQKSLSLSLGK

SEQ ID NO: 467 - protein, 694 aa, synthetic construct
  REGION 1..694: note = CD86 ECD-Q25F/F33L/H90I-sugemalimab antibody heavy chain
APLKIQAYFNETADLPCQFANSQNFSLSELVVLWQDQENLVLNEVYLGKEKFDSVHSKYMGRTSFDSDSWTLRLHNLQIKDKGLYQCIIIHKKPTGMIRIHQMNSELSVLANFSQPEIVPISNITENVYINLTCSSIHGYPEPKKMSVLLRTKNSTIEYDGVMQKSQDNVTELYDVSISLSVSFPDVTSNMTIFCILETDKTRLLSSPFSIELEDPQPPPDHIPAGGGGSGGGGSGGGGSGGGGSGEVQLLESGGGLVQPGGSLRLSCAASGFTFSSYAMSWVRQAPGKGLEWVSGISGSGGFTYYADSVKGRFTISRDNSKNTLYLQMNSLRAEDTAVYYCAKPPRGYNYGPFDYWGQGTLVTVSSASTKGPSVFPLAPCSRSTSESTAALGCLVKDYFPEPVTVSWNSGALTSGVHTFPAVLQSSGLYSLSSVVTVPSSSLGTKTYTCNVDHKPSNTKVDKRVESKYGPPCPPCPAPEFLGGPSVFLFPPKPKDTLMISRTPEVTCVVVDVSQEDPEVQFNWYVDGVEVHNAKTKPREEQFNSTYRVVSVLTVLHQDWLNGKEYKCKVSNKGLPSSIEKTISKAKGQPREPQVYTLPPSQEEMTKNQVSLTCLVKGFYPSDIAVEWESNGQPENNYKTTPPVLDSDGSFFLYSRLTVDKSRWQEGNVFSCSVMHEALHNHYTQKSLSLSLGK

SEQ ID NO: 468 - protein, 694 aa, synthetic construct
  REGION 1..694: note = CD86 ECD-Q25I/F33L/H90F-sugemalimab antibody heavy chain
APLKIQAYFNETADLPCQFANSQNISLSELVVLWQDQENLVLNEVYLGKEKFDSVHSKYMGRTSFDSDSWTLRLHNLQIKDKGLYQCIIFHKKPTGMIRIHQMNSELSVLANFSQPEIVPISNITENVYINLTCSSIHGYPEPKKMSVLLRTKNSTIEYDGVMQKSQDNVTELYDVSISLSVSFPDVTSNMTIFCILETDKTRLLSSPFSIELEDPQPPPDHIPAGGGGSGGGGSGGGGSGGGGSGEVQLLESGGGLVQPGGSLRLSCAASGFTFSSYAMSWVRQAPGKGLEWVSGISGSGGFTYYADSVKGRFTISRDNSKNTLYLQMNSLRAEDTAVYYCAKPPRGYNYGPFDYWGQGTLVTVSSASTKGPSVFPLAPCSRSTSESTAALGCLVKDYFPEPVTVSWNSGALTSGVHTFPAVLQSSGLYSLSSVVTVPSSSLGTKTYTCNVDHKPSNTKVDKRVESKYGPPCPPCPAPEFLGGPSVFLFPPKPKDTLMISRTPEVTCVVVDVSQEDPEVQFNWYVDGVEVHNAKTKPREEQFNSTYRVVSVLTVLHQDWLNGKEYKCKVSNKGLPSSIEKTISKAKGQPREPQVYTLPPSQEEMTKNQVSLTCLVKGFYPSDIAVEWESNGQPENNYKTTPPVLDSDGSFFLYSRLTVDKSRWQEGNVFSCSVMHEALHNHYTQKSLSLSLGK

SEQ ID NO: 469 - protein, 694 aa, synthetic construct
  REGION 1..694: note = CD86 ECD-Q25I/F33A/H90I-sugemalimab antibody heavy chain
APLKIQAYFNETADLPCQFANSQNISLSELVVAWQDQENLVLNEVYLGKEKFDSVHSKYMGRTSFDSDSWTLRLHNLQIKDKGLYQCIIIHKKPTGMIRIHQMNSELSVLANFSQPEIVPISNITENVYINLTCSSIHGYPEPKKMSVLLRTKNSTIEYDGVMQKSQDNVTELYDVSISLSVSFPDVTSNMTIFCILETDKTRLLSSPFSIELEDPQPPPDHIPAGGGGSGGGGSGGGGSGGGGSGEVQLLESGGGLVQPGGSLRLSCAASGFTFSSYAMSWVRQAPGKGLEWVSGISGSGGFTYYADSVKGRFTISRDNSKNTLYLQMNSLRAEDTAVYYCAKPPRGYNYGPFDYWGQGTLVTVSSASTKGPSVFPLAPCSRSTSESTAALGCLVKDYFPEPVTVSWNSGALTSGVHTFPAVLQSSGLYSLSSVVTVPSSSLGTKTYTCNVDHKPSNTKVDKRVESKYGPPCPPCPAPEFLGGPSVFLFPPKPKDTLMISRTPEVTCVVVDVSQEDPEVQFNWYVDGVEVHNAKTKPREEQFNSTYRVVSVLTVLHQDWLNGKEYKCKVSNKGLPSSIEKTISKAKGQPREPQVYTLPPSQEEMTKNQVSLTCLVKGFYPSDIAVEWESNGQPENNYKTTPPVLDSDGSFFLYSRLTVDKSRWQEGNVFSCSVMHEALHNHYTQKSLSLSLGK

SEQ ID NO: 470 - protein, 694 aa, synthetic construct
  REGION 1..694: note = CD86 ECD-Q25I/H90I-sugemalimab antibody heavy chain
APLKIQAYFNETADLPCQFANSQNISLSELVVFWQDQENLVLNEVYLGKEKFDSVHSKYMGRTSFDSDSWTLRLHNLQIKDKGLYQCIIIHKKPTGMIRIHQMNSELSVLANFSQPEIVPISNITENVYINLTCSSIHGYPEPKKMSVLLRTKNSTIEYDGVMQKSQDNVTELYDVSISLSVSFPDVTSNMTIFCILETDKTRLLSSPFSIELEDPQPPPDHIPAGGGGSGGGGSGGGGSGGGGSGEVQLLESGGGLVQPGGSLRLSCAASGFTFSSYAMSWVRQAPGKGLEWVSGISGSGGFTYYADSVKGRFTISRDNSKNTLYLQMNSLRAEDTAVYYCAKPPRGYNYGPFDYWGQGTLVTVSSASTKGPSVFPLAPCSRSTSESTAALGCLVKDYFPEPVTVSWNSGALTSGVHTFPAVLQSSGLYSLSSVVTVPSSSLGTKTYTCNVDHKPSNTKVDKRVESKYGPPCPPCPAPEFLGGPSVFLFPPKPKDTLMISRTPEVTCVVVDVSQEDPEVQFNWYVDGVEVHNAKTKPREEQFNSTYRVVSVLTVLHQDWLNGKEYKCKVSNKGLPSSIEKTISKAKGQPREPQVYTLPPSQEEMTKNQVSLTCLVKGFYPSDIAVEWESNGQPENNYKTTPPVLDSDGSFFLYSRLTVDKSRWQEGNVFSCSVMHEALHNHYTQKSLSLSLGK

SEQ ID NO: 471 - protein, 694 aa, synthetic construct
  REGION 1..694: note = CD86 ECD-Q25V/H90V-sugemalimab antibody heavy chain
APLKIQAYFNETADLPCQFANSQNVSLSELVVFWQDQENLVLNEVYLGKEKFDSVHSKYMGRTSFDSDSWTLRLHNLQIKDKGLYQCIIVHKKPTGMIRIHQMNSELSVLANFSQPEIVPISNITENVYINLTCSSIHGYPEPKKMSVLLRTKNSTIEYDGVMQKSQDNVTELYDVSISLSVSFPDVTSNMTIFCILETDKTRLLSSPFSIELEDPQPPPDHIPAGGGGSGGGGSGGGGSGGGGSGEVQLLESGGGLVQPGGSLRLSCAASGFTFSSYAMSWVRQAPGKGLEWVSGISGSGGFTYYADSVKGRFTISRDNSKNTLYLQMNSLRAEDTAVYYCAKPPRGYNYGPFDYWGQGTLVTVSSASTKGPSVFPLAPCSRSTSESTAALGCLVKDYFPEPVTVSWNSGALTSGVHTFPAVLQSSGLYSLSSVVTVPSSSLGTKTYTCNVDHKPSNTKVDKRVESKYGPPCPPCPAPEFLGGPSVFLFPPKPKDTLMISRTPEVTCVVVDVSQEDPEVQFNWYVDGVEVHNAKTKPREEQFNSTYRVVSVLTVLHQDWLNGKEYKCKVSNKGLPSSIEKTISKAKGQPREPQVYTLPPSQEEMTKNQVSLTCLVKGFYPSDIAVEWESNGQPENNYKTTPPVLDSDGSFFLYSRLTVDKSRWQEGNVFSCSVMHEALHNHYTQKSLSLSLGK

SEQ ID NO: 472 - protein, 694 aa, synthetic construct
  REGION 1..694: note = CD86 ECD-Q25V/H90I-sugemalimab antibody heavy chain
APLKIQAYFNETADLPCQFANSQNVSLSELVVFWQDQENLVLNEVYLGKEKFDSVHSKYMGRTSFDSDSWTLRLHNLQIKDKGLYQCIIIHKKPTGMIRIHQMNSELSVLANFSQPEIVPISNITENVYINLTCSSIHGYPEPKKMSVLLRTKNSTIEYDGVMQKSQDNVTELYDVSISLSVSFPDVTSNMTIFCILETDKTRLLSSPFSIELEDPQPPPDHIPAGGGGSGGGGSGGGGSGGGGSGEVQLLESGGGLVQPGGSLRLSCAASGFTFSSYAMSWVRQAPGKGLEWVSGISGSGGFTYYADSVKGRFTISRDNSKNTLYLQMNSLRAEDTAVYYCAKPPRGYNYGPFDYWGQGTLVTVSSASTKGPSVFPLAPCSRSTSESTAALGCLVKDYFPEPVTVSWNSGALTSGVHTFPAVLQSSGLYSLSSVVTVPSSSLGTKTYTCNVDHKPSNTKVDKRVESKYGPPCPPCPAPEFLGGPSVFLFPPKPKDTLMISRTPEVTCVVVDVSQEDPEVQFNWYVDGVEVHNAKTKPREEQFNSTYRVVSVLTVLHQDWLNGKEYKCKVSNKGLPSSIEKTISKAKGQPREPQVYTLPPSQEEMTKNQVSLTCLVKGFYPSDIAVEWESNGQPENNYKTTPPVLDSDGSFFLYSRLTVDKSRWQEGNVFSCSVMHEALHNHYTQKSLSLSLGK

SEQ ID NO: 473 - protein, 694 aa, synthetic construct
  REGION 1..694: note = CD86 ECD-Q25F/H90I-sugemalimab antibody heavy chain
APLKIQAYFNETADLPCQFANSQNFSLSELVVFWQDQENLVLNEVYLGKEKFDSVHSKYMGRTSFDSDSWTLRLHNLQIKDKGLYQCIIIHKKPTGMIRIHQMNSELSVLANFSQPEIVPISNITENVYINLTCSSIHGYPEPKKMSVLLRTKNSTIEYDGVMQKSQDNVTELYDVSISLSVSFPDVTSNMTIFCILETDKTRLLSSPFSIELEDPQPPPDHIPAGGGGSGGGGSGGGGSGGGGSGEVQLLESGGGLVQPGGSLRLSCAASGFTFSSYAMSWVRQAPGKGLEWVSGISGSGGFTYYADSVKGRFTISRDNSKNTLYLQMNSLRAEDTAVYYCAKPPRGYNYGPFDYWGQGTLVTVSSASTKGPSVFPLAPCSRSTSESTAALGCLVKDYFPEPVTVSWNSGALTSGVHTFPAVLQSSGLYSLSSVVTVPSSSLGTKTYTCNVDHKPSNTKVDKRVESKYGPPCPPCPAPEFLGGPSVFLFPPKPKDTLMISRTPEVTCVVVDVSQEDPEVQFNWYVDGVEVHNAKTKPREEQFNSTYRVVSVLTVLHQDWLNGKEYKCKVSNKGLPSSIEKTISKAKGQPREPQVYTLPPSQEEMTKNQVSLTCLVKGFYPSDIAVEWESNGQPENNYKTTPPVLDSDGSFFLYSRLTVDKSRWQEGNVFSCSVMHEALHNHYTQKSLSLSLGK

SEQ ID NO: 474 - protein, 694 aa, synthetic construct
  REGION 1..694: note = CD86 ECD-Q25F/H90V-sugemalimab antibody heavy chain
APLKIQAYFNETADLPCQFANSQNFSLSELVVFWQDQENLVLNEVYLGKEKFDSVHSKYMGRTSFDSDSWTLRLHNLQIKDKGLYQCIIVHKKPTGMIRIHQMNSELSVLANFSQPEIVPISNITENVYINLTCSSIHGYPEPKKMSVLLRTKNSTIEYDGVMQKSQDNVTELYDVSISLSVSFPDVTSNMTIFCILETDKTRLLSSPFSIELEDPQPPPDHIPAGGGGSGGGGSGGGGSGGGGSGEVQLLESGGGLVQPGGSLRLSCAASGFTFSSYAMSWVRQAPGKGLEWVSGISGSGGFTYYADSVKGRFTISRDNSKNTLYLQMNSLRAEDTAVYYCAKPPRGYNYGPFDYWGQGTLVTVSSASTKGPSVFPLAPCSRSTSESTAALGCLVKDYFPEPVTVSWNSGALTSGVHTFPAVLQSSGLYSLSSVVTVPSSSLGTKTYTCNVDHKPSNTKVDKRVESKYGPPCPPCPAPEFLGGPSVFLFPPKPKDTLMISRTPEVTCVVVDVSQEDPEVQFNWYVDGVEVHNAKTKPREEQFNSTYRVVSVLTVLHQDWLNGKEYKCKVSNKGLPSSIEKTISKAKGQPREPQVYTLPPSQEEMTKNQVSLTCLVKGFYPSDIAVEWESNGQPENNYKTTPPVLDSDGSFFLYSRLTVDKSRWQEGNVFSCSVMHEALHNHYTQKSLSLSLGK

SEQ ID NO: 475 - protein, 694 aa, synthetic construct
  REGION 1..694: note = CD86 ECD-A13F/Q25I/F33L/H90I-sugemalimab antibody heavy chain
APLKIQAYFNETFDLPCQFANSQNISLSELVVLWQDQENLVLNEVYLGKEKFDSVHSKYMGRTSFDSDSWTLRLHNLQIKDKGLYQCIIIHKKPTGMIRIHQMNSELSVLANFSQPEIVPISNITENVYINLTCSSIHGYPEPKKMSVLLRTKNSTIEYDGVMQKSQDNVTELYDVSISLSVSFPDVTSNMTIFCILETDKTRLLSSPFSIELEDPQPPPDHIPAGGGGSGGGGSGGGGSGGGGSGEVQLLESGGGLVQPGGSLRLSCAASGFTFSSYAMSWVRQAPGKGLEWVSGISGSGGFTYYADSVKGRFTISRDNSKNTLYLQMNSLRAEDTAVYYCAKPPRGYNYGPFDYWGQGTLVTVSSASTKGPSVFPLAPCSRSTSESTAALGCLVKDYFPEPVTVSWNSGALTSGVHTFPAVLQSSGLYSLSSVVTVPSSSLGTKTYTCNVDHKPSNTKVDKRVESKYGPPCPPCPAPEFLGGPSVFLFPPKPKDTLMISRTPEVTCVVVDVSQEDPEVQFNWYVDGVEVHNAKTKPREEQFNSTYRVVSVLTVLHQDWLNGKEYKCKVSNKGLPSSIEKTISKAKGQPREPQVYTLPPSQEEMTKNQVSLTCLVKGFYPSDIAVEWESNGQPENNYKTTPPVLDSDGSFFLYSRLTVDKSRWQEGNVFSCSVMHEALHNHYTQKSLSLSLGK

SEQ ID NO: 476 - protein, 694 aa, synthetic construct
  REGION 1..694: note = CD86 ECD-A13M/Q25I/F33L/H90I-sugemalimab antibody heavy chain
APLKIQAYFNETMDLPCQFANSQNISLSELVVLWQDQENLVLNEVYLGKEKFDSVHSKYMGRTSFDSDSWTLRLHNLQIKDKGLYQCIIIHKKPTGMIRIHQMNSELSVLANFSQPEIVPISNITENVYINLTCSSIHGYPEPKKMSVLLRTKNSTIEYDGVMQKSQDNVTELYDVSISLSVSFPDVTSNMTIFCILETDKTRLLSSPFSIELEDPQPPPDHIPAGGGGSGGGGSGGGGSGGGGSGEVQLLESGGGLVQPGGSLRLSCAASGFTFSSYAMSWVRQAPGKGLEWVSGISGSGGFTYYADSVKGRFTISRDNSKNTLYLQMNSLRAEDTAVYYCAKPPRGYNYGPFDYWGQGTLVTVSSASTKGPSVFPLAPCSRSTSESTAALGCLVKDYFPEPVTVSWNSGALTSGVHTFPAVLQSSGLYSLSSVVTVPSSSLGTKTYTCNVDHKPSNTKVDKRVESKYGPPCPPCPAPEFLGGPSVFLFPPKPKDTLMISRTPEVTCVVVDVSQEDPEVQFNWYVDGVEVHNAKTKPREEQFNSTYRVVSVLTVLHQDWLNGKEYKCKVSNKGLPSSIEKTISKAKGQPREPQVYTLPPSQEEMTKNQVSLTCLVKGFYPSDIAVEWESNGQPENNYKTTPPVLDSDGSFFLYSRLTVDKSRWQEGNVFSCSVMHEALHNHYTQKSLSLSLGK

SEQ ID NO: 477 - protein, 694 aa, synthetic construct
  REGION 1..694: note = CD86 ECD-Q25A/F33L/H90I-sugemalimab antibody heavy chain
APLKIQAYFNETADLPCQFANSQNASLSELVVLWQDQENLVLNEVYLGKEKFDSVHSKYMGRTSFDSDSWTLRLHNLQIKDKGLYQCIIIHKKPTGMIRIHQMNSELSVLANFSQPEIVPISNITENVYINLTCSSIHGYPEPKKMSVLLRTKNSTIEYDGVMQKSQDNVTELYDVSISLSVSFPDVTSNMTIFCILETDKTRLLSSPFSIELEDPQPPPDHIPAGGGGSGGGGSGGGGSGGGGSGEVQLLESGGGLVQPGGSLRLSCAASGFTFSSYAMSWVRQAPGKGLEWVSGISGSGGFTYYADSVKGRFTISRDNSKNTLYLQMNSLRAEDTAVYYCAKPPRGYNYGPFDYWGQGTLVTVSSASTKGPSVFPLAPCSRSTSESTAALGCLVKDYFPEPVTVSWNSGALTSGVHTFPAVLQSSGLYSLSSVVTVPSSSLGTKTYTCNVDHKPSNTKVDKRVESKYGPPCPPCPAPEFLGGPSVFLFPPKPKDTLMISRTPEVTCVVVDVSQEDPEVQFNWYVDGVEVHNAKTKPREEQFNSTYRVVSVLTVLHQDWLNGKEYKCKVSNKGLPSSIEKTISKAKGQPREPQVYTLPPSQEEMTKNQVSLTCLVKGFYPSDIAVEWESNGQPENNYKTTPPVLDSDGSFFLYSRLTVDKSRWQEGNVFSCSVMHEALHNHYTQKSLSLSLGK

SEQ ID NO: 478 - protein, 694 aa, synthetic construct
  REGION 1..694: note = CD86 ECD-Q25M/F33L/H90I-sugemalimab antibody heavy chain
APLKIQAYFNETADLPCQFANSQNMSLSELVVLWQDQENLVLNEVYLGKEKFDSVHSKYMGRTSFDSDSWTLRLHNLQIKDKGLYQCIIIHKKPTGMIRIHQMNSELSVLANFSQPEIVPISNITENVYINLTCSSIHGYPEPKKMSVLLRTKNSTIEYDGVMQKSQDNVTELYDVSISLSVSFPDVTSNMTIFCILETDKTRLLSSPFSIELEDPQPPPDHIPAGGGGSGGGGSGGGGSGGGGSGEVQLLESGGGLVQPGGSLRLSCAASGFTFSSYAMSWVRQAPGKGLEWVSGISGSGGFTYYADSVKGRFTISRDNSKNTLYLQMNSLRAEDTAVYYCAKPPRGYNYGPFDYWGQGTLVTVSSASTKGPSVFPLAPCSRSTSESTAALGCLVKDYFPEPVTVSWNSGALTSGVHTFPAVLQSSGLYSLSSVVTVPSSSLGTKTYTCNVDHKPSNTKVDKRVESKYGPPCPPCPAPEFLGGPSVFLFPPKPKDTLMISRTPEVTCVVVDVSQEDPEVQFNWYVDGVEVHNAKTKPREEQFNSTYRVVSVLTVLHQDWLNGKEYKCKVSNKGLPSSIEKTISKAKGQPREPQVYTLPPSQEEMTKNQVSLTCLVKGFYPSDIAVEWESNGQPENNYKTTPPVLDSDGSFFLYSRLTVDKSRWQEGNVFSCSVMHEALHNHYTQKSLSLSLGK

SEQ ID NO: 479 - protein, 694 aa, synthetic construct
  REGION 1..694: note = CD86 ECD-Q25I/F33M/H90I-sugemalimab antibody heavy chain
APLKIQAYFNETADLPCQFANSQNISLSELVVMWQDQENLVLNEVYLGKEKFDSVHSKYMGRTSFDSDSWTLRLHNLQIKDKGLYQCIIIHKKPTGMIRIHQMNSELSVLANFSQPEIVPISNITENVYINLTCSSIHGYPEPKKMSVLLRTKNSTIEYDGVMQKSQDNVTELYDVSISLSVSFPDVTSNMTIFCILETDKTRLLSSPFSIELEDPQPPPDHIPAGGGGSGGGGSGGGGSGGGGSGEVQLLESGGGLVQPGGSLRLSCAASGFTFSSYAMSWVRQAPGKGLEWVSGISGSGGFTYYADSVKGRFTISRDNSKNTLYLQMNSLRAEDTAVYYCAKPPRGYNYGPFDYWGQGTLVTVSSASTKGPSVFPLAPCSRSTSESTAALGCLVKDYFPEPVTVSWNSGALTSGVHTFPAVLQSSGLYSLSSVVTVPSSSLGTKTYTCNVDHKPSNTKVDKRVESKYGPPCPPCPAPEFLGGPSVFLFPPKPKDTLMISRTPEVTCVVVDVSQEDPEVQFNWYVDGVEVHNAKTKPREEQFNSTYRVVSVLTVLHQDWLNGKEYKCKVSNKGLPSSIEKTISKAKGQPREPQVYTLPPSQEEMTKNQVSLTCLVKGFYPSDIAVEWESNGQPENNYKTTPPVLDSDGSFFLYSRLTVDKSRWQEGNVFSCSVMHEALHNHYTQKSLSLSLGK

SEQ ID NO: 480 - protein, 694 aa, synthetic construct
  REGION 1..694: note = CD86 ECD-Q25I/F33L/I89V/H90I-sugemalimab antibody heavy chain
APLKIQAYFNETADLPCQFANSQNISLSELVVLWQDQENLVLNEVYLGKEKFDSVHSKYMGRTSFDSDSWTLRLHNLQIKDKGLYQCIVIHKKPTGMIRIHQMNSELSVLANFSQPEIVPISNITENVYINLTCSSIHGYPEPKKMSVLLRTKNSTIEYDGVMQKSQDNVTELYDVSISLSVSFPDVTSNMTIFCILETDKTRLLSSPFSIELEDPQPPPDHIPAGGGGSGGGGSGGGGSGGGGSGEVQLLESGGGLVQPGGSLRLSCAASGFTFSSYAMSWVRQAPGKGLEWVSGISGSGGFTYYADSVKGRFTISRDNSKNTLYLQMNSLRAEDTAVYYCAKPPRGYNYGPFDYWGQGTLVTVSSASTKGPSVFPLAPCSRSTSESTAALGCLVKDYFPEPVTVSWNSGALTSGVHTFPAVLQSSGLYSLSSVVTVPSSSLGTKTYTCNVDHKPSNTKVDKRVESKYGPPCPPCPAPEFLGGPSVFLFPPKPKDTLMISRTPEVTCVVVDVSQEDPEVQFNWYVDGVEVHNAKTKPREEQFNSTYRVVSVLTVLHQDWLNGKEYKCKVSNKGLPSSIEKTISKAKGQPREPQVYTLPPSQEEMTKNQVSLTCLVKGFYPSDIAVEWESNGQPENNYKTTPPVLDSDGSFFLYSRLTVDKSRWQEGNVFSCSVMHEALHNHYTQKSLSLSLGK

SEQ ID NO: 481 - protein, 694 aa, synthetic construct
  REGION 1..694: note = CD86 ECD-Q25I/F33L/I89F/H90I-sugemalimab antibody heavy chain
APLKIQAYFNETADLPCQFANSQNISLSELVVLWQDQENLVLNEVYLGKEKFDSVHSKYMGRTSFDSDSWTLRLHNLQIKDKGLYQCIFIHKKPTGMIRIHQMNSELSVLANFSQPEIVPISNITENVYINLTCSSIHGYPEPKKMSVLLRTKNSTIEYDGVMQKSQDNVTELYDVSISLSVSFPDVTSNMTIFCILETDKTRLLSSPFSIELEDPQPPPDHIPAGGGGSGGGGSGGGGSGGGGSGEVQLLESGGGLVQPGGSLRLSCAASGFTFSSYAMSWVRQAPGKGLEWVSGISGSGGFTYYADSVKGRFTISRDNSKNTLYLQMNSLRAEDTAVYYCAKPPRGYNYGPFDYWGQGTLVTVSSASTKGPSVFPLAPCSRSTSESTAALGCLVKDYFPEPVTVSWNSGALTSGVHTFPAVLQSSGLYSLSSVVTVPSSSLGTKTYTCNVDHKPSNTKVDKRVESKYGPPCPPCPAPEFLGGPSVFLFPPKPKDTLMISRTPEVTCVVVDVSQEDPEVQFNWYVDGVEVHNAKTKPREEQFNSTYRVVSVLTVLHQDWLNGKEYKCKVSNKGLPSSIEKTISKAKGQPREPQVYTLPPSQEEMTKNQVSLTCLVKGFYPSDIAVEWESNGQPENNYKTTPPVLDSDGSFFLYSRLTVDKSRWQEGNVFSCSVMHEALHNHYTQKSLSLSLGK

SEQ ID NO: 482 - protein, 694 aa, synthetic construct
  REGION 1..694: note = CD86 ECD-Q25I/F33L/I89M/H90I-sugemalimab antibody heavy chain
APLKIQAYFNETADLPCQFANSQNISLSELVVLWQDQENLVLNEVYLGKEKFDSVHSKYMGRTSFDSDSWTLRLHNLQIKDKGLYQCIMIHKKPTGMIRIHQMNSELSVLANFSQPEIVPISNITENVYINLTCSSIHGYPEPKKMSVLLRTKNSTIEYDGVMQKSQDNVTELYDVSISLSVSFPDVTSNMTIFCILETDKTRLLSSPFSIELEDPQPPPDHIPAGGGGSGGGGSGGGGSGGGGSGEVQLLESGGGLVQPGGSLRLSCAASGFTFSSYAMSWVRQAPGKGLEWVSGISGSGGFTYYADSVKGRFTISRDNSKNTLYLQMNSLRAEDTAVYYCAKPPRGYNYGPFDYWGQGTLVTVSSASTKGPSVFPLAPCSRSTSESTAALGCLVKDYFPEPVTVSWNSGALTSGVHTFPAVLQSSGLYSLSSVVTVPSSSLGTKTYTCNVDHKPSNTKVDKRVESKYGPPCPPCPAPEFLGGPSVFLFPPKPKDTLMISRTPEVTCVVVDVSQEDPEVQFNWYVDGVEVHNAKTKPREEQFNSTYRVVSVLTVLHQDWLNGKEYKCKVSNKGLPSSIEKTISKAKGQPREPQVYTLPPSQEEMTKNQVSLTCLVKGFYPSDIAVEWESNGQPENNYKTTPPVLDSDGSFFLYSRLTVDKSRWQEGNVFSCSVMHEALHNHYTQKSLSLSLGK

SEQ ID NO: 483 - protein, 694 aa, synthetic construct
  REGION 1..694: note = CD86 ECD-Q25I/F33L/H90M-sugemalimab antibody heavy chain
APLKIQAYFNETADLPCQFANSQNISLSELVVLWQDQENLVLNEVYLGKEKFDSVHSKYMGRTSFDSDSWTLRLHNLQIKDKGLYQCIIMHKKPTGMIRIHQMNSELSVLANFSQPEIVPISNITENVYINLTCSSIHGYPEPKKMSVLLRTKNSTIEYDGVMQKSQDNVTELYDVSISLSVSFPDVTSNMTIFCILETDKTRLLSSPFSIELEDPQPPPDHIPAGGGGSGGGGSGGGGSGGGGSGEVQLLESGGGLVQPGGSLRLSCAASGFTFSSYAMSWVRQAPGKGLEWVSGISGSGGFTYYADSVKGRFTISRDNSKNTLYLQMNSLRAEDTAVYYCAKPPRGYNYGPFDYWGQGTLVTVSSASTKGPSVFPLAPCSRSTSESTAALGCLVKDYFPEPVTVSWNSGALTSGVHTFPAVLQSSGLYSLSSVVTVPSSSLGTKTYTCNVDHKPSNTKVDKRVESKYGPPCPPCPAPEFLGGPSVFLFPPKPKDTLMISRTPEVTCVVVDVSQEDPEVQFNWYVDGVEVHNAKTKPREEQFNSTYRVVSVLTVLHQDWLNGKEYKCKVSNKGLPSSIEKTISKAKGQPREPQVYTLPPSQEEMTKNQVSLTCLVKGFYPSDIAVEWESNGQPENNYKTTPPVLDSDGSFFLYSRLTVDKSRWQEGNVFSCSVMHEALHNHYTQKSLSLSLGK

SEQ ID NO: 484 - protein, 579 aa, synthetic construct
  REGION 1..579: note = sugemalimab antibody heavy chain -CD86 IgV-Q25I/F33L/H90I
EVQLLESGGGLVQPGGSLRLSCAASGFTFSSYAMSWVRQAPGKGLEWVSGISGSGGFTYYADSVKGRFTISRDNSKNTLYLQMNSLRAEDTAVYYCAKPPRGYNYGPFDYWGQGTLVTVSSASTKGPSVFPLAPCSRSTSESTAALGCLVKDYFPEPVTVSWNSGALTSGVHTFPAVLQSSGLYSLSSVVTVPSSSLGTKTYTCNVDHKPSNTKVDKRVESKYGPPCPPCPAPEFLGGPSVFLFPPKPKDTLMISRTPEVTCVVVDVSQEDPEVQFNWYVDGVEVHNAKTKPREEQFNSTYRVVSVLTVLHQDWLNGKEYKCKVSNKGLPSSIEKTISKAKGQPREPQVYTLPPSQEEMTKNQVSLTCLVKGFYPSDIAVEWESNGQPENNYKTTPPVLDSDGSFFLYSRLTVDKSRWQEGNVFSCSVMHEALHNHYTQKSLSLSLGAGGGGSGGGGSGGGGSGGGGSGAPLKIQAYFNETADLPCQFANSQNISLSELVVLWQDQENLVLNEVYLGKEKFDSVHSKYMGRTSFDSDSWTLRLHNLQIKDKGLYQCIIIHKKPTGMIRIHQMNSELSVL

SEQ ID NO: 485 - protein, 579 aa, synthetic construct
  REGION 1..579: note = sugemalimab antibody heavy chain -CD86 IgV-Q25V/F33L/H90I
EVQLLESGGGLVQPGGSLRLSCAASGFTFSSYAMSWVRQAPGKGLEWVSGISGSGGFTYYADSVKGRFTISRDNSKNTLYLQMNSLRAEDTAVYYCAKPPRGYNYGPFDYWGQGTLVTVSSASTKGPSVFPLAPCSRSTSESTAALGCLVKDYFPEPVTVSWNSGALTSGVHTFPAVLQSSGLYSLSSVVTVPSSSLGTKTYTCNVDHKPSNTKVDKRVESKYGPPCPPCPAPEFLGGPSVFLFPPKPKDTLMISRTPEVTCVVVDVSQEDPEVQFNWYVDGVEVHNAKTKPREEQFNSTYRVVSVLTVLHQDWLNGKEYKCKVSNKGLPSSIEKTISKAKGQPREPQVYTLPPSQEEMTKNQVSLTCLVKGFYPSDIAVEWESNGQPENNYKTTPPVLDSDGSFFLYSRLTVDKSRWQEGNVFSCSVMHEALHNHYTQKSLSLSLGAGGGGSGGGGSGGGGSGGGGSGAPLKIQAYFNETADLPCQFANSQNVSLSELVVLWQDQENLVLNEVYLGKEKFDSVHSKYMGRTSFDSDSWTLRLHNLQIKDKGLYQCIIIHKKPTGMIRIHQMNSELSVL

SEQ ID NO: 486 - protein, 579 aa, synthetic construct
  REGION 1..579: note = sugemalimab antibody heavy chain -CD86 IgV-Q25I/F33V/H90I
EVQLLESGGGLVQPGGSLRLSCAASGFTFSSYAMSWVRQAPGKGLEWVSGISGSGGFTYYADSVKGRFTISRDNSKNTLYLQMNSLRAEDTAVYYCAKPPRGYNYGPFDYWGQGTLVTVSSASTKGPSVFPLAPCSRSTSESTAALGCLVKDYFPEPVTVSWNSGALTSGVHTFPAVLQSSGLYSLSSVVTVPSSSLGTKTYTCNVDHKPSNTKVDKRVESKYGPPCPPCPAPEFLGGPSVFLFPPKPKDTLMISRTPEVTCVVVDVSQEDPEVQFNWYVDGVEVHNAKTKPREEQFNSTYRVVSVLTVLHQDWLNGKEYKCKVSNKGLPSSIEKTISKAKGQPREPQVYTLPPSQEEMTKNQVSLTCLVKGFYPSDIAVEWESNGQPENNYKTTPPVLDSDGSFFLYSRLTVDKSRWQEGNVFSCSVMHEALHNHYTQKSLSLSLGAGGGGSGGGGSGGGGSGGGGSGAPLKIQAYFNETADLPCQFANSQNISLSELVVVWQDQENLVLNEVYLGKEKFDSVHSKYMGRTSFDSDSWTLRLHNLQIKDKGLYQCIIIHKKPTGMIRIHQMNSELSVL

SEQ ID NO: 487 - protein, 579 aa, synthetic construct
  REGION 1..579: note = sugemalimab antibody heavy chain -CD86 IgV-Q25V/F33V/H90I
EVQLLESGGGLVQPGGSLRLSCAASGFTFSSYAMSWVRQAPGKGLEWVSGISGSGGFTYYADSVKGRFTISRDNSKNTLYLQMNSLRAEDTAVYYCAKPPRGYNYGPFDYWGQGTLVTVSSASTKGPSVFPLAPCSRSTSESTAALGCLVKDYFPEPVTVSWNSGALTSGVHTFPAVLQSSGLYSLSSVVTVPSSSLGTKTYTCNVDHKPSNTKVDKRVESKYGPPCPPCPAPEFLGGPSVFLFPPKPKDTLMISRTPEVTCVVVDVSQEDPEVQFNWYVDGVEVHNAKTKPREEQFNSTYRVVSVLTVLHQDWLNGKEYKCKVSNKGLPSSIEKTISKAKGQPREPQVYTLPPSQEEMTKNQVSLTCLVKGFYPSDIAVEWESNGQPENNYKTTPPVLDSDGSFFLYSRLTVDKSRWQEGNVFSCSVMHEALHNHYTQKSLSLSLGAGGGGSGGGGSGGGGSGGGGSGAPLKIQAYFNETADLPCQFANSQNVSLSELVVVWQDQENLVLNEVYLGKEKFDSVHSKYMGRTSFDSDSWTLRLHNLQIKDKGLYQCIIIHKKPTGMIRIHQMNSELSVL

SEQ ID NO: 488 - protein, 579 aa, synthetic construct
  REGION 1..579: note = sugemalimab antibody heavy chain -CD86 IgV-Q25I/F33L/H90V
EVQLLESGGGLVQPGGSLRLSCAASGFTFSSYAMSWVRQAPGKGLEWVSGISGSGGFTYYADSVKGRFTISRDNSKNTLYLQMNSLRAEDTAVYYCAKPPRGYNYGPFDYWGQGTLVTVSSASTKGPSVFPLAPCSRSTSESTAALGCLVKDYFPEPVTVSWNSGALTSGVHTFPAVLQSSGLYSLSSVVTVPSSSLGTKTYTCNVDHKPSNTKVDKRVESKYGPPCPPCPAPEFLGGPSVFLFPPKPKDTLMISRTPEVTCVVVDVSQEDPEVQFNWYVDGVEVHNAKTKPREEQFNSTYRVVSVLTVLHQDWLNGKEYKCKVSNKGLPSSIEKTISKAKGQPREPQVYTLPPSQEEMTKNQVSLTCLVKGFYPSDIAVEWESNGQPENNYKTTPPVLDSDGSFFLYSRLTVDKSRWQEGNVFSCSVMHEALHNHYTQKSLSLSLGAGGGGSGGGGSGGGGSGGGGSGAPLKIQAYFNETADLPCQFANSQNISLSELVVLWQDQENLVLNEVYLGKEKFDSVHSKYMGRTSFDSDSWTLRLHNLQIKDKGLYQCIIVHKKPTGMIRIHQMNSELSVL

SEQ ID NO: 489 - protein, 579 aa, synthetic construct
  REGION 1..579: note = sugemalimab antibody heavy chain -CD86 IgV-Q25V/F33L/H90V
EVQLLESGGGLVQPGGSLRLSCAASGFTFSSYAMSWVRQAPGKGLEWVSGISGSGGFTYYADSVKGRFTISRDNSKNTLYLQMNSLRAEDTAVYYCAKPPRGYNYGPFDYWGQGTLVTVSSASTKGPSVFPLAPCSRSTSESTAALGCLVKDYFPEPVTVSWNSGALTSGVHTFPAVLQSSGLYSLSSVVTVPSSSLGTKTYTCNVDHKPSNTKVDKRVESKYGPPCPPCPAPEFLGGPSVFLFPPKPKDTLMISRTPEVTCVVVDVSQEDPEVQFNWYVDGVEVHNAKTKPREEQFNSTYRVVSVLTVLHQDWLNGKEYKCKVSNKGLPSSIEKTISKAKGQPREPQVYTLPPSQEEMTKNQVSLTCLVKGFYPSDIAVEWESNGQPENNYKTTPPVLDSDGSFFLYSRLTVDKSRWQEGNVFSCSVMHEALHNHYTQKSLSLSLGAGGGGSGGGGSGGGGSGGGGSGAPLKIQAYFNETADLPCQFANSQNVSLSELVVLWQDQENLVLNEVYLGKEKFDSVHSKYMGRTSFDSDSWTLRLHNLQIKDKGLYQCIIVHKKPTGMIRIHQMNSELSVL

SEQ ID NO: 490 - protein, 579 aa, synthetic construct
  REGION 1..579: note = sugemalimab antibody heavy chain -CD86 IgV-Q25I/F33V/H90V
EVQLLESGGGLVQPGGSLRLSCAASGFTFSSYAMSWVRQAPGKGLEWVSGISGSGGFTYYADSVKGRFTISRDNSKNTLYLQMNSLRAEDTAVYYCAKPPRGYNYGPFDYWGQGTLVTVSSASTKGPSVFPLAPCSRSTSESTAALGCLVKDYFPEPVTVSWNSGALTSGVHTFPAVLQSSGLYSLSSVVTVPSSSLGTKTYTCNVDHKPSNTKVDKRVESKYGPPCPPCPAPEFLGGPSVFLFPPKPKDTLMISRTPEVTCVVVDVSQEDPEVQFNWYVDGVEVHNAKTKPREEQFNSTYRVVSVLTVLHQDWLNGKEYKCKVSNKGLPSSIEKTISKAKGQPREPQVYTLPPSQEEMTKNQVSLTCLVKGFYPSDIAVEWESNGQPENNYKTTPPVLDSDGSFFLYSRLTVDKSRWQEGNVFSCSVMHEALHNHYTQKSLSLSLGAGGGGSGGGGSGGGGSGGGGSGAPLKIQAYFNETADLPCQFANSQNISLSELVVVWQDQENLVLNEVYLGKEKFDSVHSKYMGRTSFDSDSWTLRLHNLQIKDKGLYQCIIVHKKPTGMIRIHQMNSELSVL

SEQ ID NO: 491 - protein, 579 aa, synthetic construct
  REGION 1..579: note = sugemalimab antibody heavy chain -CD86 IgV-Q25V/F33V/H90V
EVQLLESGGGLVQPGGSLRLSCAASGFTFSSYAMSWVRQAPGKGLEWVSGISGSGGFTYYADSVKGRFTISRDNSKNTLYLQMNSLRAEDTAVYYCAKPPRGYNYGPFDYWGQGTLVTVSSASTKGPSVFPLAPCSRSTSESTAALGCLVKDYFPEPVTVSWNSGALTSGVHTFPAVLQSSGLYSLSSVVTVPSSSLGTKTYTCNVDHKPSNTKVDKRVESKYGPPCPPCPAPEFLGGPSVFLFPPKPKDTLMISRTPEVTCVVVDVSQEDPEVQFNWYVDGVEVHNAKTKPREEQFNSTYRVVSVLTVLHQDWLNGKEYKCKVSNKGLPSSIEKTISKAKGQPREPQVYTLPPSQEEMTKNQVSLTCLVKGFYPSDIAVEWESNGQPENNYKTTPPVLDSDGSFFLYSRLTVDKSRWQEGNVFSCSVMHEALHNHYTQKSLSLSLGAGGGGSGGGGSGGGGSGGGGSGAPLKIQAYFNETADLPCQFANSQNVSLSELVVVWQDQENLVLNEVYLGKEKFDSVHSKYMGRTSFDSDSWTLRLHNLQIKDKGLYQCIIVHKKPTGMIRIHQMNSELSVL

SEQ ID NO: 492 - protein, 579 aa, synthetic construct
  REGION 1..579: note = sugemalimab antibody heavy chain -CD86 IgV-A13L/Q25I/F33L/H90I
EVQLLESGGGLVQPGGSLRLSCAASGFTFSSYAMSWVRQAPGKGLEWVSGISGSGGFTYYADSVKGRFTISRDNSKNTLYLQMNSLRAEDTAVYYCAKPPRGYNYGPFDYWGQGTLVTVSSASTKGPSVFPLAPCSRSTSESTAALGCLVKDYFPEPVTVSWNSGALTSGVHTFPAVLQSSGLYSLSSVVTVPSSSLGTKTYTCNVDHKPSNTKVDKRVESKYGPPCPPCPAPEFLGGPSVFLFPPKPKDTLMISRTPEVTCVVVDVSQEDPEVQFNWYVDGVEVHNAKTKPREEQFNSTYRVVSVLTVLHQDWLNGKEYKCKVSNKGLPSSIEKTISKAKGQPREPQVYTLPPSQEEMTKNQVSLTCLVKGFYPSDIAVEWESNGQPENNYKTTPPVLDSDGSFFLYSRLTVDKSRWQEGNVFSCSVMHEALHNHYTQKSLSLSLGAGGGGSGGGGSGGGGSGGGGSGAPLKIQAYFNETLDLPCQFANSQNISLSELVVLWQDQENLVLNEVYLGKEKFDSVHSKYMGRTSFDSDSWTLRLHNLQIKDKGLYQCIIIHKKPTGMIRIHQMNSELSVL

SEQ ID NO: 493 - protein, 579 aa, synthetic construct
  REGION 1..579: note = sugemalimab antibody heavy chain -CD86 IgV-A13I/Q25I/F33L/H90I
EVQLLESGGGLVQPGGSLRLSCAASGFTFSSYAMSWVRQAPGKGLEWVSGISGSGGFTYYADSVKGRFTISRDNSKNTLYLQMNSLRAEDTAVYYCAKPPRGYNYGPFDYWGQGTLVTVSSASTKGPSVFPLAPCSRSTSESTAALGCLVKDYFPEPVTVSWNSGALTSGVHTFPAVLQSSGLYSLSSVVTVPSSSLGTKTYTCNVDHKPSNTKVDKRVESKYGPPCPPCPAPEFLGGPSVFLFPPKPKDTLMISRTPEVTCVVVDVSQEDPEVQFNWYVDGVEVHNAKTKPREEQFNSTYRVVSVLTVLHQDWLNGKEYKCKVSNKGLPSSIEKTISKAKGQPREPQVYTLPPSQEEMTKNQVSLTCLVKGFYPSDIAVEWESNGQPENNYKTTPPVLDSDGSFFLYSRLTVDKSRWQEGNVFSCSVMHEALHNHYTQKSLSLSLGAGGGGSGGGGSGGGGSGGGGSGAPLKIQAYFNETIDLPCQFANSQNISLSELVVLWQDQENLVLNEVYLGKEKFDSVHSKYMGRTSFDSDSWTLRLHNLQIKDKGLYQCIIIHKKPTGMIRIHQMNSELSVL

SEQ ID NO: 494 - protein, 579 aa, synthetic construct
  REGION 1..579: note = sugemalimab antibody heavy chain -CD86 IgV-A13L/Q25V/F33L/H90I
EVQLLESGGGLVQPGGSLRLSCAASGFTFSSYAMSWVRQAPGKGLEWVSGISGSGGFTYYADSVKGRFTISRDNSKNTLYLQMNSLRAEDTAVYYCAKPPRGYNYGPFDYWGQGTLVTVSSASTKGPSVFPLAPCSRSTSESTAALGCLVKDYFPEPVTVSWNSGALTSGVHTFPAVLQSSGLYSLSSVVTVPSSSLGTKTYTCNVDHKPSNTKVDKRVESKYGPPCPPCPAPEFLGGPSVFLFPPKPKDTLMISRTPEVTCVVVDVSQEDPEVQFNWYVDGVEVHNAKTKPREEQFNSTYRVVSVLTVLHQDWLNGKEYKCKVSNKGLPSSIEKTISKAKGQPREPQVYTLPPSQEEMTKNQVSLTCLVKGFYPSDIAVEWESNGQPENNYKTTPPVLDSDGSFFLYSRLTVDKSRWQEGNVFSCSVMHEALHNHYTQKSLSLSLGAGGGGSGGGGSGGGGSGGGGSGAPLKIQAYFNETLDLPCQFANSQNVSLSELVVLWQDQENLVLNEVYLGKEKFDSVHSKYMGRTSFDSDSWTLRLHNLQIKDKGLYQCIIIHKKPTGMIRIHQMNSELSVL

SEQ ID NO: 495 - protein, 579 aa, synthetic construct
  REGION 1..579: note = sugemalimab antibody heavy chain -CD86 IgV-A13I/Q25V/F33L/H90I
EVQLLESGGGLVQPGGSLRLSCAASGFTFSSYAMSWVRQAPGKGLEWVSGISGSGGFTYYADSVKGRFTISRDNSKNTLYLQMNSLRAEDTAVYYCAKPPRGYNYGPFDYWGQGTLVTVSSASTKGPSVFPLAPCSRSTSESTAALGCLVKDYFPEPVTVSWNSGALTSGVHTFPAVLQSSGLYSLSSVVTVPSSSLGTKTYTCNVDHKPSNTKVDKRVESKYGPPCPPCPAPEFLGGPSVFLFPPKPKDTLMISRTPEVTCVVVDVSQEDPEVQFNWYVDGVEVHNAKTKPREEQFNSTYRVVSVLTVLHQDWLNGKEYKCKVSNKGLPSSIEKTISKAKGQPREPQVYTLPPSQEEMTKNQVSLTCLVKGFYPSDIAVEWESNGQPENNYKTTPPVLDSDGSFFLYSRLTVDKSRWQEGNVFSCSVMHEALHNHYTQKSLSLSLGAGGGGSGGGGSGGGGSGGGGSGAPLKIQAYFNETIDLPCQFANSQNVSLSELVVLWQDQENLVLNEVYLGKEKFDSVHSKYMGRTSFDSDSWTLRLHNLQIKDKGLYQCIIIHKKPTGMIRIHQMNSELSVL

SEQ ID NO: 496 - protein, 579 aa, synthetic construct
  REGION 1..579: note = sugemalimab antibody heavy chain -CD86 IgV-Q25I/F33L/I89L/H90I
EVQLLESGGGLVQPGGSLRLSCAASGFTFSSYAMSWVRQAPGKGLEWVSGISGSGGFTYYADSVKGRFTISRDNSKNTLYLQMNSLRAEDTAVYYCAKPPRGYNYGPFDYWGQGTLVTVSSASTKGPSVFPLAPCSRSTSESTAALGCLVKDYFPEPVTVSWNSGALTSGVHTFPAVLQSSGLYSLSSVVTVPSSSLGTKTYTCNVDHKPSNTKVDKRVESKYGPPCPPCPAPEFLGGPSVFLFPPKPKDTLMISRTPEVTCVVVDVSQEDPEVQFNWYVDGVEVHNAKTKPREEQFNSTYRVVSVLTVLHQDWLNGKEYKCKVSNKGLPSSIEKTISKAKGQPREPQVYTLPPSQEEMTKNQVSLTCLVKGFYPSDIAVEWESNGQPENNYKTTPPVLDSDGSFFLYSRLTVDKSRWQEGNVFSCSVMHEALHNHYTQKSLSLSLGAGGGGSGGGGSGGGGSGGGGSGAPLKIQAYFNETADLPCQFANSQNISLSELVVLWQDQENLVLNEVYLGKEKFDSVHSKYMGRTSFDSDSWTLRLHNLQIKDKGLYQCILIHKKPTGMIRIHQMNSELSVL

SEQ ID NO: 497 - protein, 579 aa, synthetic construct
  REGION 1..579: note = sugemalimab antibody heavy chain -CD86 IgV-Q25I/F33L/M60R/H90I
EVQLLESGGGLVQPGGSLRLSCAASGFTFSSYAMSWVRQAPGKGLEWVSGISGSGGFTYYADSVKGRFTISRDNSKNTLYLQMNSLRAEDTAVYYCAKPPRGYNYGPFDYWGQGTLVTVSSASTKGPSVFPLAPCSRSTSESTAALGCLVKDYFPEPVTVSWNSGALTSGVHTFPAVLQSSGLYSLSSVVTVPSSSLGTKTYTCNVDHKPSNTKVDKRVESKYGPPCPPCPAPEFLGGPSVFLFPPKPKDTLMISRTPEVTCVVVDVSQEDPEVQFNWYVDGVEVHNAKTKPREEQFNSTYRVVSVLTVLHQDWLNGKEYKCKVSNKGLPSSIEKTISKAKGQPREPQVYTLPPSQEEMTKNQVSLTCLVKGFYPSDIAVEWESNGQPENNYKTTPPVLDSDGSFFLYSRLTVDKSRWQEGNVFSCSVMHEALHNHYTQKSLSLSLGAGGGGSGGGGSGGGGSGGGGSGAPLKIQAYFNETADLPCQFANSQNISLSELVVLWQDQENLVLNEVYLGKEKFDSVHSKYRGRTSFDSDSWTLRLHNLQIKDKGLYQCIIIHKKPTGMIRIHQMNSELSVL

SEQ ID NO: 498 - protein, 579 aa, synthetic construct
  REGION 1..579: note = sugemalimab antibody heavy chain -CD86 IgV-Q25V/F33L/I89L/H90I
EVQLLESGGGLVQPGGSLRLSCAASGFTFSSYAMSWVRQAPGKGLEWVSGISGSGGFTYYADSVKGRFTISRDNSKNTLYLQMNSLRAEDTAVYYCAKPPRGYNYGPFDYWGQGTLVTVSSASTKGPSVFPLAPCSRSTSESTAALGCLVKDYFPEPVTVSWNSGALTSGVHTFPAVLQSSGLYSLSSVVTVPSSSLGTKTYTCNVDHKPSNTKVDKRVESKYGPPCPPCPAPEFLGGPSVFLFPPKPKDTLMISRTPEVTCVVVDVSQEDPEVQFNWYVDGVEVHNAKTKPREEQFNSTYRVVSVLTVLHQDWLNGKEYKCKVSNKGLPSSIEKTISKAKGQPREPQVYTLPPSQEEMTKNQVSLTCLVKGFYPSDIAVEWESNGQPENNYKTTPPVLDSDGSFFLYSRLTVDKSRWQEGNVFSCSVMHEALHNHYTQKSLSLSLGAGGGGSGGGGSGGGGSGGGGSGAPLKIQAYFNETADLPCQFANSQNVSLSELVVLWQDQENLVLNEVYLGKEKFDSVHSKYMGRTSFDSDSWTLRLHNLQIKDKGLYQCILIHKKPTGMIRIHQMNSELSVL

SEQ ID NO: 499 - protein, 579 aa, synthetic construct
  REGION 1..579: note = sugemalimab antibody heavy chain -CD86 IgV-Q25V/F33L/M60R/H90I
EVQLLESGGGLVQPGGSLRLSCAASGFTFSSYAMSWVRQAPGKGLEWVSGISGSGGFTYYADSVKGRFTISRDNSKNTLYLQMNSLRAEDTAVYYCAKPPRGYNYGPFDYWGQGTLVTVSSASTKGPSVFPLAPCSRSTSESTAALGCLVKDYFPEPVTVSWNSGALTSGVHTFPAVLQSSGLYSLSSVVTVPSSSLGTKTYTCNVDHKPSNTKVDKRVESKYGPPCPPCPAPEFLGGPSVFLFPPKPKDTLMISRTPEVTCVVVDVSQEDPEVQFNWYVDGVEVHNAKTKPREEQFNSTYRVVSVLTVLHQDWLNGKEYKCKVSNKGLPSSIEKTISKAKGQPREPQVYTLPPSQEEMTKNQVSLTCLVKGFYPSDIAVEWESNGQPENNYKTTPPVLDSDGSFFLYSRLTVDKSRWQEGNVFSCSVMHEALHNHYTQKSLSLSLGAGGGGSGGGGSGGGGSGGGGSGAPLKIQAYFNETADLPCQFANSQNVSLSELVVLWQDQENLVLNEVYLGKEKFDSVHSKYRGRTSFDSDSWTLRLHNLQIKDKGLYQCIIIHKKPTGMIRIHQMNSELSVL

SEQ ID NO: 500 - protein, 579 aa, synthetic construct
  REGION 1..579: note = sugemalimab antibody heavy chain -CD86 IgV-Q25F/F33L/H90I
EVQLLESGGGLVQPGGSLRLSCAASGFTFSSYAMSWVRQAPGKGLEWVSGISGSGGFTYYADSVKGRFTISRDNSKNTLYLQMNSLRAEDTAVYYCAKPPRGYNYGPFDYWGQGTLVTVSSASTKGPSVFPLAPCSRSTSESTAALGCLVKDYFPEPVTVSWNSGALTSGVHTFPAVLQSSGLYSLSSVVTVPSSSLGTKTYTCNVDHKPSNTKVDKRVESKYGPPCPPCPAPEFLGGPSVFLFPPKPKDTLMISRTPEVTCVVVDVSQEDPEVQFNWYVDGVEVHNAKTKPREEQFNSTYRVVSVLTVLHQDWLNGKEYKCKVSNKGLPSSIEKTISKAKGQPREPQVYTLPPSQEEMTKNQVSLTCLVKGFYPSDIAVEWESNGQPENNYKTTPPVLDSDGSFFLYSRLTVDKSRWQEGNVFSCSVMHEALHNHYTQKSLSLSLGAGGGGSGGGGSGGGGSGGGGSGAPLKIQAYFNETADLPCQFANSQNFSLSELVVLWQDQENLVLNEVYLGKEKFDSVHSKYMGRTSFDSDSWTLRLHNLQIKDKGLYQCIIIHKKPTGMIRIHQMNSELSVL

SEQ ID NO: 501 - protein, 579 aa, synthetic construct
  REGION 1..579: note = sugemalimab antibody heavy chain -CD86 IgV-Q25I/F33L/H90F
EVQLLESGGGLVQPGGSLRLSCAASGFTFSSYAMSWVRQAPGKGLEWVSGISGSGGFTYYADSVKGRFTISRDNSKNTLYLQMNSLRAEDTAVYYCAKPPRGYNYGPFDYWGQGTLVTVSSASTKGPSVFPLAPCSRSTSESTAALGCLVKDYFPEPVTVSWNSGALTSGVHTFPAVLQSSGLYSLSSVVTVPSSSLGTKTYTCNVDHKPSNTKVDKRVESKYGPPCPPCPAPEFLGGPSVFLFPPKPKDTLMISRTPEVTCVVVDVSQEDPEVQFNWYVDGVEVHNAKTKPREEQFNSTYRVVSVLTVLHQDWLNGKEYKCKVSNKGLPSSIEKTISKAKGQPREPQVYTLPPSQEEMTKNQVSLTCLVKGFYPSDIAVEWESNGQPENNYKTTPPVLDSDGSFFLYSRLTVDKSRWQEGNVFSCSVMHEALHNHYTQKSLSLSLGAGGGGSGGGGSGGGGSGGGGSGAPLKIQAYFNETADLPCQFANSQNISLSELVVLWQDQENLVLNEVYLGKEKFDSVHSKYMGRTSFDSDSWTLRLHNLQIKDKGLYQCIIFHKKPTGMIRIHQMNSELSVL

SEQ ID NO: 502 - protein, 579 aa, synthetic construct
  REGION 1..579: note = sugemalimab antibody heavy chain -CD86 IgV-Q25I/F33A/H90I
EVQLLESGGGLVQPGGSLRLSCAASGFTFSSYAMSWVRQAPGKGLEWVSGISGSGGFTYYADSVKGRFTISRDNSKNTLYLQMNSLRAEDTAVYYCAKPPRGYNYGPFDYWGQGTLVTVSSASTKGPSVFPLAPCSRSTSESTAALGCLVKDYFPEPVTVSWNSGALTSGVHTFPAVLQSSGLYSLSSVVTVPSSSLGTKTYTCNVDHKPSNTKVDKRVESKYGPPCPPCPAPEFLGGPSVFLFPPKPKDTLMISRTPEVTCVVVDVSQEDPEVQFNWYVDGVEVHNAKTKPREEQFNSTYRVVSVLTVLHQDWLNGKEYKCKVSNKGLPSSIEKTISKAKGQPREPQVYTLPPSQEEMTKNQVSLTCLVKGFYPSDIAVEWESNGQPENNYKTTPPVLDSDGSFFLYSRLTVDKSRWQEGNVFSCSVMHEALHNHYTQKSLSLSLGAGGGGSGGGGSGGGGSGGGGSGAPLKIQAYFNETADLPCQFANSQNISLSELVVAWQDQENLVLNEVYLGKEKFDSVHSKYMGRTSFDSDSWTLRLHNLQIKDKGLYQCIIIHKKPTGMIRIHQMNSELSVL

SEQ ID NO: 503 - protein, 579 aa, synthetic construct
  REGION 1..579: note = sugemalimab antibody heavy chain -CD86 IgV-Q25I/H90I
EVQLLESGGGLVQPGGSLRLSCAASGFTFSSYAMSWVRQAPGKGLEWVSGISGSGGFTYYADSVKGRFTISRDNSKNTLYLQMNSLRAEDTAVYYCAKPPRGYNYGPFDYWGQGTLVTVSSASTKGPSVFPLAPCSRSTSESTAALGCLVKDYFPEPVTVSWNSGALTSGVHTFPAVLQSSGLYSLSSVVTVPSSSLGTKTYTCNVDHKPSNTKVDKRVESKYGPPCPPCPAPEFLGGPSVFLFPPKPKDTLMISRTPEVTCVVVDVSQEDPEVQFNWYVDGVEVHNAKTKPREEQFNSTYRVVSVLTVLHQDWLNGKEYKCKVSNKGLPSSIEKTISKAKGQPREPQVYTLPPSQEEMTKNQVSLTCLVKGFYPSDIAVEWESNGQPENNYKTTPPVLDSDGSFFLYSRLTVDKSRWQEGNVFSCSVMHEALHNHYTQKSLSLSLGAGGGGSGGGGSGGGGSGGGGSGAPLKIQAYFNETADLPCQFANSQNISLSELVVFWQDQENLVLNEVYLGKEKFDSVHSKYMGRTSFDSDSWTLRLHNLQIKDKGLYQCIIIHKKPTGMIRIHQMNSELSVL

SEQ ID NO: 504 - protein, 579 aa, synthetic construct
  REGION 1..579: note = sugemalimab antibody heavy chain -CD86 IgV-Q25V/H90V
EVQLLESGGGLVQPGGSLRLSCAASGFTFSSYAMSWVRQAPGKGLEWVSGISGSGGFTYYADSVKGRFTISRDNSKNTLYLQMNSLRAEDTAVYYCAKPPRGYNYGPFDYWGQGTLVTVSSASTKGPSVFPLAPCSRSTSESTAALGCLVKDYFPEPVTVSWNSGALTSGVHTFPAVLQSSGLYSLSSVVTVPSSSLGTKTYTCNVDHKPSNTKVDKRVESKYGPPCPPCPAPEFLGGPSVFLFPPKPKDTLMISRTPEVTCVVVDVSQEDPEVQFNWYVDGVEVHNAKTKPREEQFNSTYRVVSVLTVLHQDWLNGKEYKCKVSNKGLPSSIEKTISKAKGQPREPQVYTLPPSQEEMTKNQVSLTCLVKGFYPSDIAVEWESNGQPENNYKTTPPVLDSDGSFFLYSRLTVDKSRWQEGNVFSCSVMHEALHNHYTQKSLSLSLGAGGGGSGGGGSGGGGSGGGGSGAPLKIQAYFNETADLPCQFANSQNVSLSELVVFWQDQENLVLNEVYLGKEKFDSVHSKYMGRTSFDSDSWTLRLHNLQIKDKGLYQCIIVHKKPTGMIRIHQMNSELSVL

SEQ ID NO: 505 - protein, 579 aa, synthetic construct
  REGION 1..579: note = sugemalimab antibody heavy chain -CD86 IgV-Q25V/H90I
EVQLLESGGGLVQPGGSLRLSCAASGFTFSSYAMSWVRQAPGKGLEWVSGISGSGGFTYYADSVKGRFTISRDNSKNTLYLQMNSLRAEDTAVYYCAKPPRGYNYGPFDYWGQGTLVTVSSASTKGPSVFPLAPCSRSTSESTAALGCLVKDYFPEPVTVSWNSGALTSGVHTFPAVLQSSGLYSLSSVVTVPSSSLGTKTYTCNVDHKPSNTKVDKRVESKYGPPCPPCPAPEFLGGPSVFLFPPKPKDTLMISRTPEVTCVVVDVSQEDPEVQFNWYVDGVEVHNAKTKPREEQFNSTYRVVSVLTVLHQDWLNGKEYKCKVSNKGLPSSIEKTISKAKGQPREPQVYTLPPSQEEMTKNQVSLTCLVKGFYPSDIAVEWESNGQPENNYKTTPPVLDSDGSFFLYSRLTVDKSRWQEGNVFSCSVMHEALHNHYTQKSLSLSLGAGGGGSGGGGSGGGGSGGGGSGAPLKIQAYFNETADLPCQFANSQNVSLSELVVFWQDQENLVLNEVYLGKEKFDSVHSKYMGRTSFDSDSWTLRLHNLQIKDKGLYQCIIIHKKPTGMIRIHQMNSELSVL

SEQ ID NO: 506 - protein, 579 aa, synthetic construct
  REGION 1..579: note = sugemalimab antibody heavy chain -CD86 IgV-Q25F/H90I
EVQLLESGGGLVQPGGSLRLSCAASGFTFSSYAMSWVRQAPGKGLEWVSGISGSGGFTYYADSVKGRFTISRDNSKNTLYLQMNSLRAEDTAVYYCAKPPRGYNYGPFDYWGQGTLVTVSSASTKGPSVFPLAPCSRSTSESTAALGCLVKDYFPEPVTVSWNSGALTSGVHTFPAVLQSSGLYSLSSVVTVPSSSLGTKTYTCNVDHKPSNTKVDKRVESKYGPPCPPCPAPEFLGGPSVFLFPPKPKDTLMISRTPEVTCVVVDVSQEDPEVQFNWYVDGVEVHNAKTKPREEQFNSTYRVVSVLTVLHQDWLNGKEYKCKVSNKGLPSSIEKTISKAKGQPREPQVYTLPPSQEEMTKNQVSLTCLVKGFYPSDIAVEWESNGQPENNYKTTPPVLDSDGSFFLYSRLTVDKSRWQEGNVFSCSVMHEALHNHYTQKSLSLSLGAGGGGSGGGGSGGGGSGGGGSGAPLKIQAYFNETADLPCQFANSQNFSLSELVVFWQDQENLVLNEVYLGKEKFDSVHSKYMGRTSFDSDSWTLRLHNLQIKDKGLYQCIIIHKKPTGMIRIHQMNSELSVL

SEQ ID NO: 507 - protein, 579 aa, synthetic construct
  REGION 1..579: note = sugemalimab antibody heavy chain -CD86 IgV-Q25F/H90V
EVQLLESGGGLVQPGGSLRLSCAASGFTFSSYAMSWVRQAPGKGLEWVSGISGSGGFTYYADSVKGRFTISRDNSKNTLYLQMNSLRAEDTAVYYCAKPPRGYNYGPFDYWGQGTLVTVSSASTKGPSVFPLAPCSRSTSESTAALGCLVKDYFPEPVTVSWNSGALTSGVHTFPAVLQSSGLYSLSSVVTVPSSSLGTKTYTCNVDHKPSNTKVDKRVESKYGPPCPPCPAPEFLGGPSVFLFPPKPKDTLMISRTPEVTCVVVDVSQEDPEVQFNWYVDGVEVHNAKTKPREEQFNSTYRVVSVLTVLHQDWLNGKEYKCKVSNKGLPSSIEKTISKAKGQPREPQVYTLPPSQEEMTKNQVSLTCLVKGFYPSDIAVEWESNGQPENNYKTTPPVLDSDGSFFLYSRLTVDKSRWQEGNVFSCSVMHEALHNHYTQKSLSLSLGAGGGGSGGGGSGGGGSGGGGSGAPLKIQAYFNETADLPCQFANSQNFSLSELVVFWQDQENLVLNEVYLGKEKFDSVHSKYMGRTSFDSDSWTLRLHNLQIKDKGLYQCIIVHKKPTGMIRIHQMNSELSVL

SEQ ID NO: 508 - protein, 579 aa, synthetic construct
  REGION 1..579: note = sugemalimab antibody heavy chain -CD86 IgV-A13F/Q25I/F33L/H90I
EVQLLESGGGLVQPGGSLRLSCAASGFTFSSYAMSWVRQAPGKGLEWVSGISGSGGFTYYADSVKGRFTISRDNSKNTLYLQMNSLRAEDTAVYYCAKPPRGYNYGPFDYWGQGTLVTVSSASTKGPSVFPLAPCSRSTSESTAALGCLVKDYFPEPVTVSWNSGALTSGVHTFPAVLQSSGLYSLSSVVTVPSSSLGTKTYTCNVDHKPSNTKVDKRVESKYGPPCPPCPAPEFLGGPSVFLFPPKPKDTLMISRTPEVTCVVVDVSQEDPEVQFNWYVDGVEVHNAKTKPREEQFNSTYRVVSVLTVLHQDWLNGKEYKCKVSNKGLPSSIEKTISKAKGQPREPQVYTLPPSQEEMTKNQVSLTCLVKGFYPSDIAVEWESNGQPENNYKTTPPVLDSDGSFFLYSRLTVDKSRWQEGNVFSCSVMHEALHNHYTQKSLSLSLGAGGGGSGGGGSGGGGSGGGGSGAPLKIQAYFNETFDLPCQFANSQNISLSELVVLWQDQENLVLNEVYLGKEKFDSVHSKYMGRTSFDSDSWTLRLHNLQIKDKGLYQCIIIHKKPTGMIRIHQMNSELSVL

SEQ ID NO: 509 - protein, 579 aa, synthetic construct
  REGION 1..579: note = sugemalimab antibody heavy chain -CD86 IgV-A13M/Q25I/F33L/H90I
EVQLLESGGGLVQPGGSLRLSCAASGFTFSSYAMSWVRQAPGKGLEWVSGISGSGGFTYYADSVKGRFTISRDNSKNTLYLQMNSLRAEDTAVYYCAKPPRGYNYGPFDYWGQGTLVTVSSASTKGPSVFPLAPCSRSTSESTAALGCLVKDYFPEPVTVSWNSGALTSGVHTFPAVLQSSGLYSLSSVVTVPSSSLGTKTYTCNVDHKPSNTKVDKRVESKYGPPCPPCPAPEFLGGPSVFLFPPKPKDTLMISRTPEVTCVVVDVSQEDPEVQFNWYVDGVEVHNAKTKPREEQFNSTYRVVSVLTVLHQDWLNGKEYKCKVSNKGLPSSIEKTISKAKGQPREPQVYTLPPSQEEMTKNQVSLTCLVKGFYPSDIAVEWESNGQPENNYKTTPPVLDSDGSFFLYSRLTVDKSRWQEGNVFSCSVMHEALHNHYTQKSLSLSLGAGGGGSGGGGSGGGGSGGGGSGAPLKIQAYFNETMDLPCQFANSQNISLSELVVLWQDQENLVLNEVYLGKEKFDSVHSKYMGRTSFDSDSWTLRLHNLQIKDKGLYQCIIIHKKPTGMIRIHQMNSELSVL

SEQ ID NO: 510 - protein, 579 aa, synthetic construct
  REGION 1..579: note = sugemalimab antibody heavy chain -CD86 IgV-Q25A/F33L/H90I
EVQLLESGGGLVQPGGSLRLSCAASGFTFSSYAMSWVRQAPGKGLEWVSGISGSGGFTYYADSVKGRFTISRDNSKNTLYLQMNSLRAEDTAVYYCAKPPRGYNYGPFDYWGQGTLVTVSSASTKGPSVFPLAPCSRSTSESTAALGCLVKDYFPEPVTVSWNSGALTSGVHTFPAVLQSSGLYSLSSVVTVPSSSLGTKTYTCNVDHKPSNTKVDKRVESKYGPPCPPCPAPEFLGGPSVFLFPPKPKDTLMISRTPEVTCVVVDVSQEDPEVQFNWYVDGVEVHNAKTKPREEQFNSTYRVVSVLTVLHQDWLNGKEYKCKVSNKGLPSSIEKTISKAKGQPREPQVYTLPPSQEEMTKNQVSLTCLVKGFYPSDIAVEWESNGQPENNYKTTPPVLDSDGSFFLYSRLTVDKSRWQEGNVFSCSVMHEALHNHYTQKSLSLSLGAGGGGSGGGGSGGGGSGGGGSGAPLKIQAYFNETADLPCQFANSQNASLSELVVLWQDQENLVLNEVYLGKEKFDSVHSKYMGRTSFDSDSWTLRLHNLQIKDKGLYQCIIIHKKPTGMIRIHQMNSELSVL

SEQ ID NO: 511 - protein, 579 aa, synthetic construct
  REGION 1..579: note = sugemalimab antibody heavy chain -CD86 IgV-Q25M/F33L/H90I
EVQLLESGGGLVQPGGSLRLSCAASGFTFSSYAMSWVRQAPGKGLEWVSGISGSGGFTYYADSVKGRFTISRDNSKNTLYLQMNSLRAEDTAVYYCAKPPRGYNYGPFDYWGQGTLVTVSSASTKGPSVFPLAPCSRSTSESTAALGCLVKDYFPEPVTVSWNSGALTSGVHTFPAVLQSSGLYSLSSVVTVPSSSLGTKTYTCNVDHKPSNTKVDKRVESKYGPPCPPCPAPEFLGGPSVFLFPPKPKDTLMISRTPEVTCVVVDVSQEDPEVQFNWYVDGVEVHNAKTKPREEQFNSTYRVVSVLTVLHQDWLNGKEYKCKVSNKGLPSSIEKTISKAKGQPREPQVYTLPPSQEEMTKNQVSLTCLVKGFYPSDIAVEWESNGQPENNYKTTPPVLDSDGSFFLYSRLTVDKSRWQEGNVFSCSVMHEALHNHYTQKSLSLSLGAGGGGSGGGGSGGGGSGGGGSGAPLKIQAYFNETADLPCQFANSQNMSLSELVVLWQDQENLVLNEVYLGKEKFDSVHSKYMGRTSFDSDSWTLRLHNLQIKDKGLYQCIIIHKKPTGMIRIHQMNSELSVL

SEQ ID NO: 512 - protein, 579 aa, synthetic construct
  REGION 1..579: note = sugemalimab antibody heavy chain -CD86 IgV-Q25I/F33M/H90I
EVQLLESGGGLVQPGGSLRLSCAASGFTFSSYAMSWVRQAPGKGLEWVSGISGSGGFTYYADSVKGRFTISRDNSKNTLYLQMNSLRAEDTAVYYCAKPPRGYNYGPFDYWGQGTLVTVSSASTKGPSVFPLAPCSRSTSESTAALGCLVKDYFPEPVTVSWNSGALTSGVHTFPAVLQSSGLYSLSSVVTVPSSSLGTKTYTCNVDHKPSNTKVDKRVESKYGPPCPPCPAPEFLGGPSVFLFPPKPKDTLMISRTPEVTCVVVDVSQEDPEVQFNWYVDGVEVHNAKTKPREEQFNSTYRVVSVLTVLHQDWLNGKEYKCKVSNKGLPSSIEKTISKAKGQPREPQVYTLPPSQEEMTKNQVSLTCLVKGFYPSDIAVEWESNGQPENNYKTTPPVLDSDGSFFLYSRLTVDKSRWQEGNVFSCSVMHEALHNHYTQKSLSLSLGAGGGGSGGGGSGGGGSGGGGSGAPLKIQAYFNETADLPCQFANSQNISLSELVVMWQDQENLVLNEVYLGKEKFDSVHSKYMGRTSFDSDSWTLRLHNLQIKDKGLYQCIIIHKKPTGMIRIHQMNSELSVL

SEQ ID NO: 513 - protein, 579 aa, synthetic construct
  REGION 1..579: note = sugemalimab antibody heavy chain -CD86 IgV-Q25I/F33L/I89V/H90I
EVQLLESGGGLVQPGGSLRLSCAASGFTFSSYAMSWVRQAPGKGLEWVSGISGSGGFTYYADSVKGRFTISRDNSKNTLYLQMNSLRAEDTAVYYCAKPPRGYNYGPFDYWGQGTLVTVSSASTKGPSVFPLAPCSRSTSESTAALGCLVKDYFPEPVTVSWNSGALTSGVHTFPAVLQSSGLYSLSSVVTVPSSSLGTKTYTCNVDHKPSNTKVDKRVESKYGPPCPPCPAPEFLGGPSVFLFPPKPKDTLMISRTPEVTCVVVDVSQEDPEVQFNWYVDGVEVHNAKTKPREEQFNSTYRVVSVLTVLHQDWLNGKEYKCKVSNKGLPSSIEKTISKAKGQPREPQVYTLPPSQEEMTKNQVSLTCLVKGFYPSDIAVEWESNGQPENNYKTTPPVLDSDGSFFLYSRLTVDKSRWQEGNVFSCSVMHEALHNHYTQKSLSLSLGAGGGGSGGGGSGGGGSGGGGSGAPLKIQAYFNETADLPCQFANSQNISLSELVVLWQDQENLVLNEVYLGKEKFDSVHSKYMGRTSFDSDSWTLRLHNLQIKDKGLYQCIVIHKKPTGMIRIHQMNSELSVL

SEQ ID NO: 514 - protein, 579 aa, synthetic construct
  REGION 1..579: note = sugemalimab antibody heavy chain -CD86 IgV-Q25I/F33L/I89F/H90I
EVQLLESGGGLVQPGGSLRLSCAASGFTFSSYAMSWVRQAPGKGLEWVSGISGSGGFTYYADSVKGRFTISRDNSKNTLYLQMNSLRAEDTAVYYCAKPPRGYNYGPFDYWGQGTLVTVSSASTKGPSVFPLAPCSRSTSESTAALGCLVKDYFPEPVTVSWNSGALTSGVHTFPAVLQSSGLYSLSSVVTVPSSSLGTKTYTCNVDHKPSNTKVDKRVESKYGPPCPPCPAPEFLGGPSVFLFPPKPKDTLMISRTPEVTCVVVDVSQEDPEVQFNWYVDGVEVHNAKTKPREEQFNSTYRVVSVLTVLHQDWLNGKEYKCKVSNKGLPSSIEKTISKAKGQPREPQVYTLPPSQEEMTKNQVSLTCLVKGFYPSDIAVEWESNGQPENNYKTTPPVLDSDGSFFLYSRLTVDKSRWQEGNVFSCSVMHEALHNHYTQKSLSLSLGAGGGGSGGGGSGGGGSGGGGSGAPLKIQAYFNETADLPCQFANSQNISLSELVVLWQDQENLVLNEVYLGKEKFDSVHSKYMGRTSFDSDSWTLRLHNLQIKDKGLYQCIFIHKKPTGMIRIHQMNSELSVL

SEQ ID NO: 515 - protein, 579 aa, synthetic construct
  REGION 1..579: note = sugemalimab antibody heavy chain -CD86 IgV-Q25I/F33L/I89M/H90I
EVQLLESGGGLVQPGGSLRLSCAASGFTFSSYAMSWVRQAPGKGLEWVSGISGSGGFTYYADSVKGRFTISRDNSKNTLYLQMNSLRAEDTAVYYCAKPPRGYNYGPFDYWGQGTLVTVSSASTKGPSVFPLAPCSRSTSESTAALGCLVKDYFPEPVTVSWNSGALTSGVHTFPAVLQSSGLYSLSSVVTVPSSSLGTKTYTCNVDHKPSNTKVDKRVESKYGPPCPPCPAPEFLGGPSVFLFPPKPKDTLMISRTPEVTCVVVDVSQEDPEVQFNWYVDGVEVHNAKTKPREEQFNSTYRVVSVLTVLHQDWLNGKEYKCKVSNKGLPSSIEKTISKAKGQPREPQVYTLPPSQEEMTKNQVSLTCLVKGFYPSDIAVEWESNGQPENNYKTTPPVLDSDGSFFLYSRLTVDKSRWQEGNVFSCSVMHEALHNHYTQKSLSLSLGAGGGGSGGGGSGGGGSGGGGSGAPLKIQAYFNETADLPCQFANSQNISLSELVVLWQDQENLVLNEVYLGKEKFDSVHSKYMGRTSFDSDSWTLRLHNLQIKDKGLYQCIMIHKKPTGMIRIHQMNSELSVL

SEQ ID NO: 516 - protein, 579 aa, synthetic construct
  REGION 1..579: note = sugemalimab antibody heavy chain -CD86 IgV-Q25I/F33L/H90M
EVQLLESGGGLVQPGGSLRLSCAASGFTFSSYAMSWVRQAPGKGLEWVSGISGSGGFTYYADSVKGRFTISRDNSKNTLYLQMNSLRAEDTAVYYCAKPPRGYNYGPFDYWGQGTLVTVSSASTKGPSVFPLAPCSRSTSESTAALGCLVKDYFPEPVTVSWNSGALTSGVHTFPAVLQSSGLYSLSSVVTVPSSSLGTKTYTCNVDHKPSNTKVDKRVESKYGPPCPPCPAPEFLGGPSVFLFPPKPKDTLMISRTPEVTCVVVDVSQEDPEVQFNWYVDGVEVHNAKTKPREEQFNSTYRVVSVLTVLHQDWLNGKEYKCKVSNKGLPSSIEKTISKAKGQPREPQVYTLPPSQEEMTKNQVSLTCLVKGFYPSDIAVEWESNGQPENNYKTTPPVLDSDGSFFLYSRLTVDKSRWQEGNVFSCSVMHEALHNHYTQKSLSLSLGAGGGGSGGGGSGGGGSGGGGSGAPLKIQAYFNETADLPCQFANSQNISLSELVVLWQDQENLVLNEVYLGKEKFDSVHSKYMGRTSFDSDSWTLRLHNLQIKDKGLYQCIIMHKKPTGMIRIHQMNSELSVL

SEQ ID NO: 517 - protein, 580 aa, synthetic construct
  REGION 1..580: note = CD86 IgV-Q25I/F33L/H90I-sugemalimab antibody heavy chain
APLKIQAYFNETADLPCQFANSQNISLSELVVLWQDQENLVLNEVYLGKEKFDSVHSKYMGRTSFDSDSWTLRLHNLQIKDKGLYQCIIIHKKPTGMIRIHQMNSELSVLAGGGGSGGGGSGGGGSGGGGSGEVQLLESGGGLVQPGGSLRLSCAASGFTFSSYAMSWVRQAPGKGLEWVSGISGSGGFTYYADSVKGRFTISRDNSKNTLYLQMNSLRAEDTAVYYCAKPPRGYNYGPFDYWGQGTLVTVSSASTKGPSVFPLAPCSRSTSESTAALGCLVKDYFPEPVTVSWNSGALTSGVHTFPAVLQSSGLYSLSSVVTVPSSSLGTKTYTCNVDHKPSNTKVDKRVESKYGPPCPPCPAPEFLGGPSVFLFPPKPKDTLMISRTPEVTCVVVDVSQEDPEVQFNWYVDGVEVHNAKTKPREEQFNSTYRVVSVLTVLHQDWLNGKEYKCKVSNKGLPSSIEKTISKAKGQPREPQVYTLPPSQEEMTKNQVSLTCLVKGFYPSDIAVEWESNGQPENNYKTTPPVLDSDGSFFLYSRLTVDKSRWQEGNVFSCSVMHEALHNHYTQKSLSLSLGK

SEQ ID NO: 518 - protein, 580 aa, synthetic construct
  REGION 1..580: note = CD86 IgV-Q25V/F33L/H90I-sugemalimab antibody heavy chain
APLKIQAYFNETADLPCQFANSQNVSLSELVVLWQDQENLVLNEVYLGKEKFDSVHSKYMGRTSFDSDSWTLRLHNLQIKDKGLYQCIIIHKKPTGMIRIHQMNSELSVLAGGGGSGGGGSGGGGSGGGGSGEVQLLESGGGLVQPGGSLRLSCAASGFTFSSYAMSWVRQAPGKGLEWVSGISGSGGFTYYADSVKGRFTISRDNSKNTLYLQMNSLRAEDTAVYYCAKPPRGYNYGPFDYWGQGTLVTVSSASTKGPSVFPLAPCSRSTSESTAALGCLVKDYFPEPVTVSWNSGALTSGVHTFPAVLQSSGLYSLSSVVTVPSSSLGTKTYTCNVDHKPSNTKVDKRVESKYGPPCPPCPAPEFLGGPSVFLFPPKPKDTLMISRTPEVTCVVVDVSQEDPEVQFNWYVDGVEVHNAKTKPREEQFNSTYRVVSVLTVLHQDWLNGKEYKCKVSNKGLPSSIEKTISKAKGQPREPQVYTLPPSQEEMTKNQVSLTCLVKGFYPSDIAVEWESNGQPENNYKTTPPVLDSDGSFFLYSRLTVDKSRWQEGNVFSCSVMHEALHNHYTQKSLSLSLGK

SEQ ID NO: 519 - protein, 580 aa, synthetic construct
  REGION 1..580: note = CD86 IgV-Q25I/F33V/H90I-sugemalimab antibody heavy chain
APLKIQAYFNETADLPCQFANSQNISLSELVVVWQDQENLVLNEVYLGKEKFDSVHSKYMGRTSFDSDSWTLRLHNLQIKDKGLYQCIIIHKKPTGMIRIHQMNSELSVLAGGGGSGGGGSGGGGSGGGGSGEVQLLESGGGLVQPGGSLRLSCAASGFTFSSYAMSWVRQAPGKGLEWVSGISGSGGFTYYADSVKGRFTISRDNSKNTLYLQMNSLRAEDTAVYYCAKPPRGYNYGPFDYWGQGTLVTVSSASTKGPSVFPLAPCSRSTSESTAALGCLVKDYFPEPVTVSWNSGALTSGVHTFPAVLQSSGLYSLSSVVTVPSSSLGTKTYTCNVDHKPSNTKVDKRVESKYGPPCPPCPAPEFLGGPSVFLFPPKPKDTLMISRTPEVTCVVVDVSQEDPEVQFNWYVDGVEVHNAKTKPREEQFNSTYRVVSVLTVLHQDWLNGKEYKCKVSNKGLPSSIEKTISKAKGQPREPQVYTLPPSQEEMTKNQVSLTCLVKGFYPSDIAVEWESNGQPENNYKTTPPVLDSDGSFFLYSRLTVDKSRWQEGNVFSCSVMHEALHNHYTQKSLSLSLGK

SEQ ID NO: 520 - protein, 580 aa, synthetic construct
  REGION 1..580: note = CD86 IgV-Q25V/F33V/H90I-sugemalimab antibody heavy chain
APLKIQAYFNETADLPCQFANSQNVSLSELVVVWQDQENLVLNEVYLGKEKFDSVHSKYMGRTSFDSDSWTLRLHNLQIKDKGLYQCIIIHKKPTGMIRIHQMNSELSVLAGGGGSGGGGSGGGGSGGGGSGEVQLLESGGGLVQPGGSLRLSCAASGFTFSSYAMSWVRQAPGKGLEWVSGISGSGGFTYYADSVKGRFTISRDNSKNTLYLQMNSLRAEDTAVYYCAKPPRGYNYGPFDYWGQGTLVTVSSASTKGPSVFPLAPCSRSTSESTAALGCLVKDYFPEPVTVSWNSGALTSGVHTFPAVLQSSGLYSLSSVVTVPSSSLGTKTYTCNVDHKPSNTKVDKRVESKYGPPCPPCPAPEFLGGPSVFLFPPKPKDTLMISRTPEVTCVVVDVSQEDPEVQFNWYVDGVEVHNAKTKPREEQFNSTYRVVSVLTVLHQDWLNGKEYKCKVSNKGLPSSIEKTISKAKGQPREPQVYTLPPSQEEMTKNQVSLTCLVKGFYPSDIAVEWESNGQPENNYKTTPPVLDSDGSFFLYSRLTVDKSRWQEGNVFSCSVMHEALHNHYTQKSLSLSLGK

SEQ ID NO: 521 - protein, 580 aa, synthetic construct
  REGION 1..580: note = CD86 IgV-Q25I/F33L/H90V-sugemalimab antibody heavy chain
APLKIQAYFNETADLPCQFANSQNISLSELVVLWQDQENLVLNEVYLGKEKFDSVHSKYMGRTSFDSDSWTLRLHNLQIKDKGLYQCIIVHKKPTGMIRIHQMNSELSVLAGGGGSGGGGSGGGGSGGGGSGEVQLLESGGGLVQPGGSLRLSCAASGFTFSSYAMSWVRQAPGKGLEWVSGISGSGGFTYYADSVKGRFTISRDNSKNTLYLQMNSLRAEDTAVYYCAKPPRGYNYGPFDYWGQGTLVTVSSASTKGPSVFPLAPCSRSTSESTAALGCLVKDYFPEPVTVSWNSGALTSGVHTFPAVLQSSGLYSLSSVVTVPSSSLGTKTYTCNVDHKPSNTKVDKRVESKYGPPCPPCPAPEFLGGPSVFLFPPKPKDTLMISRTPEVTCVVVDVSQEDPEVQFNWYVDGVEVHNAKTKPREEQFNSTYRVVSVLTVLHQDWLNGKEYKCKVSNKGLPSSIEKTISKAKGQPREPQVYTLPPSQEEMTKNQVSLTCLVKGFYPSDIAVEWESNGQPENNYKTTPPVLDSDGSFFLYSRLTVDKSRWQEGNVFSCSVMHEALHNHYTQKSLSLSLGK

SEQ ID NO: 522 - protein, 580 aa, synthetic construct
  REGION 1..580: note = CD86 IgV-Q25V/F33L/H90V-sugemalimab antibody heavy chain
APLKIQAYFNETADLPCQFANSQNVSLSELVVLWQDQENLVLNEVYLGKEKFDSVHSKYMGRTSFDSDSWTLRLHNLQIKDKGLYQCIIVHKKPTGMIRIHQMNSELSVLAGGGGSGGGGSGGGGSGGGGSGEVQLLESGGGLVQPGGSLRLSCAASGFTFSSYAMSWVRQAPGKGLEWVSGISGSGGFTYYADSVKGRFTISRDNSKNTLYLQMNSLRAEDTAVYYCAKPPRGYNYGPFDYWGQGTLVTVSSASTKGPSVFPLAPCSRSTSESTAALGCLVKDYFPEPVTVSWNSGALTSGVHTFPAVLQSSGLYSLSSVVTVPSSSLGTKTYTCNVDHKPSNTKVDKRVESKYGPPCPPCPAPEFLGGPSVFLFPPKPKDTLMISRTPEVTCVVVDVSQEDPEVQFNWYVDGVEVHNAKTKPREEQFNSTYRVVSVLTVLHQDWLNGKEYKCKVSNKGLPSSIEKTISKAKGQPREPQVYTLPPSQEEMTKNQVSLTCLVKGFYPSDIAVEWESNGQPENNYKTTPPVLDSDGSFFLYSRLTVDKSRWQEGNVFSCSVMHEALHNHYTQKSLSLSLGK

SEQ ID NO: 523 - protein, 580 aa, synthetic construct
  REGION 1..580: note = CD86 IgV-Q25I/F33V/H90V-sugemalimab antibody heavy chain
APLKIQAYFNETADLPCQFANSQNISLSELVVVWQDQENLVLNEVYLGKEKFDSVHSKYMGRTSFDSDSWTLRLHNLQIKDKGLYQCIIVHKKPTGMIRIHQMNSELSVLAGGGGSGGGGSGGGGSGGGGSGEVQLLESGGGLVQPGGSLRLSCAASGFTFSSYAMSWVRQAPGKGLEWVSGISGSGGFTYYADSVKGRFTISRDNSKNTLYLQMNSLRAEDTAVYYCAKPPRGYNYGPFDYWGQGTLVTVSSASTKGPSVFPLAPCSRSTSESTAALGCLVKDYFPEPVTVSWNSGALTSGVHTFPAVLQSSGLYSLSSVVTVPSSSLGTKTYTCNVDHKPSNTKVDKRVESKYGPPCPPCPAPEFLGGPSVFLFPPKPKDTLMISRTPEVTCVVVDVSQEDPEVQFNWYVDGVEVHNAKTKPREEQFNSTYRVVSVLTVLHQDWLNGKEYKCKVSNKGLPSSIEKTISKAKGQPREPQVYTLPPSQEEMTKNQVSLTCLVKGFYPSDIAVEWESNGQPENNYKTTPPVLDSDGSFFLYSRLTVDKSRWQEGNVFSCSVMHEALHNHYTQKSLSLSLGK

SEQ ID NO: 524 - protein, 580 aa, synthetic construct
  REGION 1..580: note = CD86 IgV-Q25V/F33V/H90V-sugemalimab antibody heavy chain
APLKIQAYFNETADLPCQFANSQNVSLSELVVVWQDQENLVLNEVYLGKEKFDSVHSKYMGRTSFDSDSWTLRLHNLQIKDKGLYQCIIVHKKPTGMIRIHQMNSELSVLAGGGGSGGGGSGGGGSGGGGSGEVQLLESGGGLVQPGGSLRLSCAASGFTFSSYAMSWVRQAPGKGLEWVSGISGSGGFTYYADSVKGRFTISRDNSKNTLYLQMNSLRAEDTAVYYCAKPPRGYNYGPFDYWGQGTLVTVSSASTKGPSVFPLAPCSRSTSESTAALGCLVKDYFPEPVTVSWNSGALTSGVHTFPAVLQSSGLYSLSSVVTVPSSSLGTKTYTCNVDHKPSNTKVDKRVESKYGPPCPPCPAPEFLGGPSVFLFPPKPKDTLMISRTPEVTCVVVDVSQEDPEVQFNWYVDGVEVHNAKTKPREEQFNSTYRVVSVLTVLHQDWLNGKEYKCKVSNKGLPSSIEKTISKAKGQPREPQVYTLPPSQEEMTKNQVSLTCLVKGFYPSDIAVEWESNGQPENNYKTTPPVLDSDGSFFLYSRLTVDKSRWQEGNVFSCSVMHEALHNHYTQKSLSLSLGK

SEQ ID NO: 525 - protein, 580 aa, synthetic construct
  REGION 1..580: note = CD86 IgV-A13L/Q25I/F33L/H90I-sugemalimab antibody heavy chain
APLKIQAYFNETLDLPCQFANSQNISLSELVVLWQDQENLVLNEVYLGKEKFDSVHSKYMGRTSFDSDSWTLRLHNLQIKDKGLYQCIIIHKKPTGMIRIHQMNSELSVLAGGGGSGGGGSGGGGSGGGGSGEVQLLESGGGLVQPGGSLRLSCAASGFTFSSYAMSWVRQAPGKGLEWVSGISGSGGFTYYADSVKGRFTISRDNSKNTLYLQMNSLRAEDTAVYYCAKPPRGYNYGPFDYWGQGTLVTVSSASTKGPSVFPLAPCSRSTSESTAALGCLVKDYFPEPVTVSWNSGALTSGVHTFPAVLQSSGLYSLSSVVTVPSSSLGTKTYTCNVDHKPSNTKVDKRVESKYGPPCPPCPAPEFLGGPSVFLFPPKPKDTLMISRTPEVTCVVVDVSQEDPEVQFNWYVDGVEVHNAKTKPREEQFNSTYRVVSVLTVLHQDWLNGKEYKCKVSNKGLPSSIEKTISKAKGQPREPQVYTLPPSQEEMTKNQVSLTCLVKGFYPSDIAVEWESNGQPENNYKTTPPVLDSDGSFFLYSRLTVDKSRWQEGNVFSCSVMHEALHNHYTQKSLSLSLGK

SEQ ID NO: 526 - protein, 580 aa, synthetic construct
  REGION 1..580: note = CD86 IgV-A13I/Q25I/F33L/H90I-sugemalimab antibody heavy chain
APLKIQAYFNETIDLPCQFANSQNISLSELVVLWQDQENLVLNEVYLGKEKFDSVHSKYMGRTSFDSDSWTLRLHNLQIKDKGLYQCIIIHKKPTGMIRIHQMNSELSVLAGGGGSGGGGSGGGGSGGGGSGEVQLLESGGGLVQPGGSLRLSCAASGFTFSSYAMSWVRQAPGKGLEWVSGISGSGGFTYYADSVKGRFTISRDNSKNTLYLQMNSLRAEDTAVYYCAKPPRGYNYGPFDYWGQGTLVTVSSASTKGPSVFPLAPCSRSTSESTAALGCLVKDYFPEPVTVSWNSGALTSGVHTFPAVLQSSGLYSLSSVVTVPSSSLGTKTYTCNVDHKPSNTKVDKRVESKYGPPCPPCPAPEFLGGPSVFLFPPKPKDTLMISRTPEVTCVVVDVSQEDPEVQFNWYVDGVEVHNAKTKPREEQFNSTYRVVSVLTVLHQDWLNGKEYKCKVSNKGLPSSIEKTISKAKGQPREPQVYTLPPSQEEMTKNQVSLTCLVKGFYPSDIAVEWESNGQPENNYKTTPPVLDSDGSFFLYSRLTVDKSRWQEGNVFSCSVMHEALHNHYTQKSLSLSLGK

SEQ ID NO: 527 - protein, 580 aa, synthetic construct
  REGION 1..580: note = CD86 IgV-A13L/Q25V/F33L/H90I-sugemalimab antibody heavy chain
APLKIQAYFNETLDLPCQFANSQNVSLSELVVLWQDQENLVLNEVYLGKEKFDSVHSKYMGRTSFDSDSWTLRLHNLQIKDKGLYQCIIIHKKPTGMIRIHQMNSELSVLAGGGGSGGGGSGGGGSGGGGSGEVQLLESGGGLVQPGGSLRLSCAASGFTFSSYAMSWVRQAPGKGLEWVSGISGSGGFTYYADSVKGRFTISRDNSKNTLYLQMNSLRAEDTAVYYCAKPPRGYNYGPFDYWGQGTLVTVSSASTKGPSVFPLAPCSRSTSESTAALGCLVKDYFPEPVTVSWNSGALTSGVHTFPAVLQSSGLYSLSSVVTVPSSSLGTKTYTCNVDHKPSNTKVDKRVESKYGPPCPPCPAPEFLGGPSVFLFPPKPKDTLMISRTPEVTCVVVDVSQEDPEVQFNWYVDGVEVHNAKTKPREEQFNSTYRVVSVLTVLHQDWLNGKEYKCKVSNKGLPSSIEKTISKAKGQPREPQVYTLPPSQEEMTKNQVSLTCLVKGFYPSDIAVEWESNGQPENNYKTTPPVLDSDGSFFLYSRLTVDKSRWQEGNVFSCSVMHEALHNHYTQKSLSLSLGK

SEQ ID NO: 528 - protein, 580 aa, synthetic construct
  REGION 1..580: note = CD86 IgV-A13I/Q25V/F33L/H90I-sugemalimab antibody heavy chain
APLKIQAYFNETIDLPCQFANSQNVSLSELVVLWQDQENLVLNEVYLGKEKFDSVHSKYMGRTSFDSDSWTLRLHNLQIKDKGLYQCIIIHKKPTGMIRIHQMNSELSVLAGGGGSGGGGSGGGGSGGGGSGEVQLLESGGGLVQPGGSLRLSCAASGFTFSSYAMSWVRQAPGKGLEWVSGISGSGGFTYYADSVKGRFTISRDNSKNTLYLQMNSLRAEDTAVYYCAKPPRGYNYGPFDYWGQGTLVTVSSASTKGPSVFPLAPCSRSTSESTAALGCLVKDYFPEPVTVSWNSGALTSGVHTFPAVLQSSGLYSLSSVVTVPSSSLGTKTYTCNVDHKPSNTKVDKRVESKYGPPCPPCPAPEFLGGPSVFLFPPKPKDTLMISRTPEVTCVVVDVSQEDPEVQFNWYVDGVEVHNAKTKPREEQFNSTYRVVSVLTVLHQDWLNGKEYKCKVSNKGLPSSIEKTISKAKGQPREPQVYTLPPSQEEMTKNQVSLTCLVKGFYPSDIAVEWESNGQPENNYKTTPPVLDSDGSFFLYSRLTVDKSRWQEGNVFSCSVMHEALHNHYTQKSLSLSLGK

SEQ ID NO: 529 - protein, 580 aa, synthetic construct
  REGION 1..580: note = CD86 IgV-Q25I/F33L/I89L/H90I-sugemalimab antibody heavy chain
APLKIQAYFNETADLPCQFANSQNISLSELVVLWQDQENLVLNEVYLGKEKFDSVHSKYMGRTSFDSDSWTLRLHNLQIKDKGLYQCILIHKKPTGMIRIHQMNSELSVLAGGGGSGGGGSGGGGSGGGGSGEVQLLESGGGLVQPGGSLRLSCAASGFTFSSYAMSWVRQAPGKGLEWVSGISGSGGFTYYADSVKGRFTISRDNSKNTLYLQMNSLRAEDTAVYYCAKPPRGYNYGPFDYWGQGTLVTVSSASTKGPSVFPLAPCSRSTSESTAALGCLVKDYFPEPVTVSWNSGALTSGVHTFPAVLQSSGLYSLSSVVTVPSSSLGTKTYTCNVDHKPSNTKVDKRVESKYGPPCPPCPAPEFLGGPSVFLFPPKPKDTLMISRTPEVTCVVVDVSQEDPEVQFNWYVDGVEVHNAKTKPREEQFNSTYRVVSVLTVLHQDWLNGKEYKCKVSNKGLPSSIEKTISKAKGQPREPQVYTLPPSQEEMTKNQVSLTCLVKGFYPSDIAVEWESNGQPENNYKTTPPVLDSDGSFFLYSRLTVDKSRWQEGNVFSCSVMHEALHNHYTQKSLSLSLGK

SEQ ID NO: 530 - protein, 580 aa, synthetic construct
  REGION 1..580: note = CD86 IgV-Q25I/F33L/M60R/H90I-sugemalimab antibody heavy chain
APLKIQAYFNETADLPCQFANSQNISLSELVVLWQDQENLVLNEVYLGKEKFDSVHSKYRGRTSFDSDSWTLRLHNLQIKDKGLYQCIIIHKKPTGMIRIHQMNSELSVLAGGGGSGGGGSGGGGSGGGGSGEVQLLESGGGLVQPGGSLRLSCAASGFTFSSYAMSWVRQAPGKGLEWVSGISGSGGFTYYADSVKGRFTISRDNSKNTLYLQMNSLRAEDTAVYYCAKPPRGYNYGPFDYWGQGTLVTVSSASTKGPSVFPLAPCSRSTSESTAALGCLVKDYFPEPVTVSWNSGALTSGVHTFPAVLQSSGLYSLSSVVTVPSSSLGTKTYTCNVDHKPSNTKVDKRVESKYGPPCPPCPAPEFLGGPSVFLFPPKPKDTLMISRTPEVTCVVVDVSQEDPEVQFNWYVDGVEVHNAKTKPREEQFNSTYRVVSVLTVLHQDWLNGKEYKCKVSNKGLPSSIEKTISKAKGQPREPQVYTLPPSQEEMTKNQVSLTCLVKGFYPSDIAVEWESNGQPENNYKTTPPVLDSDGSFFLYSRLTVDKSRWQEGNVFSCSVMHEALHNHYTQKSLSLSLGK

SEQ ID NO: 531 - protein, 580 aa, synthetic construct
  REGION 1..580: note = CD86 IgV-Q25V/F33L/I89L/H90I-sugemalimab antibody heavy chain
APLKIQAYFNETADLPCQFANSQNVSLSELVVLWQDQENLVLNEVYLGKEKFDSVHSKYMGRTSFDSDSWTLRLHNLQIKDKGLYQCILIHKKPTGMIRIHQMNSELSVLAGGGGSGGGGSGGGGSGGGGSGEVQLLESGGGLVQPGGSLRLSCAASGFTFSSYAMSWVRQAPGKGLEWVSGISGSGGFTYYADSVKGRFTISRDNSKNTLYLQMNSLRAEDTAVYYCAKPPRGYNYGPFDYWGQGTLVTVSSASTKGPSVFPLAPCSRSTSESTAALGCLVKDYFPEPVTVSWNSGALTSGVHTFPAVLQSSGLYSLSSVVTVPSSSLGTKTYTCNVDHKPSNTKVDKRVESKYGPPCPPCPAPEFLGGPSVFLFPPKPKDTLMISRTPEVTCVVVDVSQEDPEVQFNWYVDGVEVHNAKTKPREEQFNSTYRVVSVLTVLHQDWLNGKEYKCKVSNKGLPSSIEKTISKAKGQPREPQVYTLPPSQEEMTKNQVSLTCLVKGFYPSDIAVEWESNGQPENNYKTTPPVLDSDGSFFLYSRLTVDKSRWQEGNVFSCSVMHEALHNHYTQKSLSLSLGK

SEQ ID NO: 532 - protein, 580 aa, synthetic construct
  REGION 1..580: note = CD86 IgV-Q25V/F33L/M60R/H90I-sugemalimab antibody heavy chain
APLKIQAYFNETADLPCQFANSQNVSLSELVVLWQDQENLVLNEVYLGKEKFDSVHSKYRGRTSFDSDSWTLRLHNLQIKDKGLYQCIIIHKKPTGMIRIHQMNSELSVLAGGGGSGGGGSGGGGSGGGGSGEVQLLESGGGLVQPGGSLRLSCAASGFTFSSYAMSWVRQAPGKGLEWVSGISGSGGFTYYADSVKGRFTISRDNSKNTLYLQMNSLRAEDTAVYYCAKPPRGYNYGPFDYWGQGTLVTVSSASTKGPSVFPLAPCSRSTSESTAALGCLVKDYFPEPVTVSWNSGALTSGVHTFPAVLQSSGLYSLSSVVTVPSSSLGTKTYTCNVDHKPSNTKVDKRVESKYGPPCPPCPAPEFLGGPSVFLFPPKPKDTLMISRTPEVTCVVVDVSQEDPEVQFNWYVDGVEVHNAKTKPREEQFNSTYRVVSVLTVLHQDWLNGKEYKCKVSNKGLPSSIEKTISKAKGQPREPQVYTLPPSQEEMTKNQVSLTCLVKGFYPSDIAVEWESNGQPENNYKTTPPVLDSDGSFFLYSRLTVDKSRWQEGNVFSCSVMHEALHNHYTQKSLSLSLGK

SEQ ID NO: 533 - protein, 580 aa, synthetic construct
  REGION 1..580: note = CD86 IgV-Q25F/F33L/H90I-sugemalimab antibody heavy chain
APLKIQAYFNETADLPCQFANSQNFSLSELVVLWQDQENLVLNEVYLGKEKFDSVHSKYMGRTSFDSDSWTLRLHNLQIKDKGLYQCIIIHKKPTGMIRIHQMNSELSVLAGGGGSGGGGSGGGGSGGGGSGEVQLLESGGGLVQPGGSLRLSCAASGFTFSSYAMSWVRQAPGKGLEWVSGISGSGGFTYYADSVKGRFTISRDNSKNTLYLQMNSLRAEDTAVYYCAKPPRGYNYGPFDYWGQGTLVTVSSASTKGPSVFPLAPCSRSTSESTAALGCLVKDYFPEPVTVSWNSGALTSGVHTFPAVLQSSGLYSLSSVVTVPSSSLGTKTYTCNVDHKPSNTKVDKRVESKYGPPCPPCPAPEFLGGPSVFLFPPKPKDTLMISRTPEVTCVVVDVSQEDPEVQFNWYVDGVEVHNAKTKPREEQFNSTYRVVSVLTVLHQDWLNGKEYKCKVSNKGLPSSIEKTISKAKGQPREPQVYTLPPSQEEMTKNQVSLTCLVKGFYPSDIAVEWESNGQPENNYKTTPPVLDSDGSFFLYSRLTVDKSRWQEGNVFSCSVMHEALHNHYTQKSLSLSLGK

SEQ ID NO: 534 - protein, 580 aa, synthetic construct
  REGION 1..580: note = CD86 IgV-Q25I/F33L/H90F-sugemalimab antibody heavy chain
APLKIQAYFNETADLPCQFANSQNISLSELVVLWQDQENLVLNEVYLGKEKFDSVHSKYMGRTSFDSDSWTLRLHNLQIKDKGLYQCIIFHKKPTGMIRIHQMNSELSVLAGGGGSGGGGSGGGGSGGGGSGEVQLLESGGGLVQPGGSLRLSCAASGFTFSSYAMSWVRQAPGKGLEWVSGISGSGGFTYYADSVKGRFTISRDNSKNTLYLQMNSLRAEDTAVYYCAKPPRGYNYGPFDYWGQGTLVTVSSASTKGPSVFPLAPCSRSTSESTAALGCLVKDYFPEPVTVSWNSGALTSGVHTFPAVLQSSGLYSLSSVVTVPSSSLGTKTYTCNVDHKPSNTKVDKRVESKYGPPCPPCPAPEFLGGPSVFLFPPKPKDTLMISRTPEVTCVVVDVSQEDPEVQFNWYVDGVEVHNAKTKPREEQFNSTYRVVSVLTVLHQDWLNGKEYKCKVSNKGLPSSIEKTISKAKGQPREPQVYTLPPSQEEMTKNQVSLTCLVKGFYPSDIAVEWESNGQPENNYKTTPPVLDSDGSFFLYSRLTVDKSRWQEGNVFSCSVMHEALHNHYTQKSLSLSLGK

SEQ ID NO: 535 - protein, 580 aa, synthetic construct
  REGION 1..580: note = CD86 IgV-Q25I/F33A/H90I-sugemalimab antibody heavy chain
APLKIQAYFNETADLPCQFANSQNISLSELVVAWQDQENLVLNEVYLGKEKFDSVHSKYMGRTSFDSDSWTLRLHNLQIKDKGLYQCIIIHKKPTGMIRIHQMNSELSVLAGGGGSGGGGSGGGGSGGGGSGEVQLLESGGGLVQPGGSLRLSCAASGFTFSSYAMSWVRQAPGKGLEWVSGISGSGGFTYYADSVKGRFTISRDNSKNTLYLQMNSLRAEDTAVYYCAKPPRGYNYGPFDYWGQGTLVTVSSASTKGPSVFPLAPCSRSTSESTAALGCLVKDYFPEPVTVSWNSGALTSGVHTFPAVLQSSGLYSLSSVVTVPSSSLGTKTYTCNVDHKPSNTKVDKRVESKYGPPCPPCPAPEFLGGPSVFLFPPKPKDTLMISRTPEVTCVVVDVSQEDPEVQFNWYVDGVEVHNAKTKPREEQFNSTYRVVSVLTVLHQDWLNGKEYKCKVSNKGLPSSIEKTISKAKGQPREPQVYTLPPSQEEMTKNQVSLTCLVKGFYPSDIAVEWESNGQPENNYKTTPPVLDSDGSFFLYSRLTVDKSRWQEGNVFSCSVMHEALHNHYTQKSLSLSLGK

SEQ ID NO: 536 - protein, 580 aa, synthetic construct
  REGION 1..580: note = CD86 IgV-Q25I/H90I-sugemalimab antibody heavy chain
APLKIQAYFNETADLPCQFANSQNISLSELVVFWQDQENLVLNEVYLGKEKFDSVHSKYMGRTSFDSDSWTLRLHNLQIKDKGLYQCIIIHKKPTGMIRIHQMNSELSVLAGGGGSGGGGSGGGGSGGGGSGEVQLLESGGGLVQPGGSLRLSCAASGFTFSSYAMSWVRQAPGKGLEWVSGISGSGGFTYYADSVKGRFTISRDNSKNTLYLQMNSLRAEDTAVYYCAKPPRGYNYGPFDYWGQGTLVTVSSASTKGPSVFPLAPCSRSTSESTAALGCLVKDYFPEPVTVSWNSGALTSGVHTFPAVLQSSGLYSLSSVVTVPSSSLGTKTYTCNVDHKPSNTKVDKRVESKYGPPCPPCPAPEFLGGPSVFLFPPKPKDTLMISRTPEVTCVVVDVSQEDPEVQFNWYVDGVEVHNAKTKPREEQFNSTYRVVSVLTVLHQDWLNGKEYKCKVSNKGLPSSIEKTISKAKGQPREPQVYTLPPSQEEMTKNQVSLTCLVKGFYPSDIAVEWESNGQPENNYKTTPPVLDSDGSFFLYSRLTVDKSRWQEGNVFSCSVMHEALHNHYTQKSLSLSLGK

SEQ ID NO: 537 - protein, 580 aa, synthetic construct
  REGION 1..580: note = CD86 IgV-Q25V/H90V-sugemalimab antibody heavy chain
APLKIQAYFNETADLPCQFANSQNVSLSELVVFWQDQENLVLNEVYLGKEKFDSVHSKYMGRTSFDSDSWTLRLHNLQIKDKGLYQCIIVHKKPTGMIRIHQMNSELSVLAGGGGSGGGGSGGGGSGGGGSGEVQLLESGGGLVQPGGSLRLSCAASGFTFSSYAMSWVRQAPGKGLEWVSGISGSGGFTYYADSVKGRFTISRDNSKNTLYLQMNSLRAEDTAVYYCAKPPRGYNYGPFDYWGQGTLVTVSSASTKGPSVFPLAPCSRSTSESTAALGCLVKDYFPEPVTVSWNSGALTSGVHTFPAVLQSSGLYSLSSVVTVPSSSLGTKTYTCNVDHKPSNTKVDKRVESKYGPPCPPCPAPEFLGGPSVFLFPPKPKDTLMISRTPEVTCVVVDVSQEDPEVQFNWYVDGVEVHNAKTKPREEQFNSTYRVVSVLTVLHQDWLNGKEYKCKVSNKGLPSSIEKTISKAKGQPREPQVYTLPPSQEEMTKNQVSLTCLVKGFYPSDIAVEWESNGQPENNYKTTPPVLDSDGSFFLYSRLTVDKSRWQEGNVFSCSVMHEALHNHYTQKSLSLSLGK

SEQ ID NO: 538 - protein, 580 aa, synthetic construct
  REGION 1..580: note = CD86 IgV-Q25V/H90I-sugemalimab antibody heavy chain
APLKIQAYFNETADLPCQFANSQNVSLSELVVFWQDQENLVLNEVYLGKEKFDSVHSKYMGRTSFDSDSWTLRLHNLQIKDKGLYQCIIIHKKPTGMIRIHQMNSELSVLAGGGGSGGGGSGGGGSGGGGSGEVQLLESGGGLVQPGGSLRLSCAASGFTFSSYAMSWVRQAPGKGLEWVSGISGSGGFTYYADSVKGRFTISRDNSKNTLYLQMNSLRAEDTAVYYCAKPPRGYNYGPFDYWGQGTLVTVSSASTKGPSVFPLAPCSRSTSESTAALGCLVKDYFPEPVTVSWNSGALTSGVHTFPAVLQSSGLYSLSSVVTVPSSSLGTKTYTCNVDHKPSNTKVDKRVESKYGPPCPPCPAPEFLGGPSVFLFPPKPKDTLMISRTPEVTCVVVDVSQEDPEVQFNWYVDGVEVHNAKTKPREEQFNSTYRVVSVLTVLHQDWLNGKEYKCKVSNKGLPSSIEKTISKAKGQPREPQVYTLPPSQEEMTKNQVSLTCLVKGFYPSDIAVEWESNGQPENNYKTTPPVLDSDGSFFLYSRLTVDKSRWQEGNVFSCSVMHEALHNHYTQKSLSLSLGK

SEQ ID NO: 539 - protein, 580 aa, synthetic construct
  REGION 1..580: note = CD86 IgV-Q25F/H90I-sugemalimab antibody heavy chain
APLKIQAYFNETADLPCQFANSQNFSLSELVVFWQDQENLVLNEVYLGKEKFDSVHSKYMGRTSFDSDSWTLRLHNLQIKDKGLYQCIIIHKKPTGMIRIHQMNSELSVLAGGGGSGGGGSGGGGSGGGGSGEVQLLESGGGLVQPGGSLRLSCAASGFTFSSYAMSWVRQAPGKGLEWVSGISGSGGFTYYADSVKGRFTISRDNSKNTLYLQMNSLRAEDTAVYYCAKPPRGYNYGPFDYWGQGTLVTVSSASTKGPSVFPLAPCSRSTSESTAALGCLVKDYFPEPVTVSWNSGALTSGVHTFPAVLQSSGLYSLSSVVTVPSSSLGTKTYTCNVDHKPSNTKVDKRVESKYGPPCPPCPAPEFLGGPSVFLFPPKPKDTLMISRTPEVTCVVVDVSQEDPEVQFNWYVDGVEVHNAKTKPREEQFNSTYRVVSVLTVLHQDWLNGKEYKCKVSNKGLPSSIEKTISKAKGQPREPQVYTLPPSQEEMTKNQVSLTCLVKGFYPSDIAVEWESNGQPENNYKTTPPVLDSDGSFFLYSRLTVDKSRWQEGNVFSCSVMHEALHNHYTQKSLSLSLGK

SEQ ID NO: 540 - protein, 580 aa, synthetic construct
  REGION 1..580: note = CD86 IgV-Q25F/H90V-sugemalimab antibody heavy chain
APLKIQAYFNETADLPCQFANSQNFSLSELVVFWQDQENLVLNEVYLGKEKFDSVHSKYMGRTSFDSDSWTLRLHNLQIKDKGLYQCIIVHKKPTGMIRIHQMNSELSVLAGGGGSGGGGSGGGGSGGGGSGEVQLLESGGGLVQPGGSLRLSCAASGFTFSSYAMSWVRQAPGKGLEWVSGISGSGGFTYYADSVKGRFTISRDNSKNTLYLQMNSLRAEDTAVYYCAKPPRGYNYGPFDYWGQGTLVTVSSASTKGPSVFPLAPCSRSTSESTAALGCLVKDYFPEPVTVSWNSGALTSGVHTFPAVLQSSGLYSLSSVVTVPSSSLGTKTYTCNVDHKPSNTKVDKRVESKYGPPCPPCPAPEFLGGPSVFLFPPKPKDTLMISRTPEVTCVVVDVSQEDPEVQFNWYVDGVEVHNAKTKPREEQFNSTYRVVSVLTVLHQDWLNGKEYKCKVSNKGLPSSIEKTISKAKGQPREPQVYTLPPSQEEMTKNQVSLTCLVKGFYPSDIAVEWESNGQPENNYKTTPPVLDSDGSFFLYSRLTVDKSRWQEGNVFSCSVMHEALHNHYTQKSLSLSLGK

SEQ ID NO: 541 - protein, 580 aa, synthetic construct
  REGION 1..580: note = CD86 IgV-A13F/Q25I/F33L/H90I-sugemalimab antibody heavy chain
APLKIQAYFNETFDLPCQFANSQNISLSELVVLWQDQENLVLNEVYLGKEKFDSVHSKYMGRTSFDSDSWTLRLHNLQIKDKGLYQCIIIHKKPTGMIRIHQMNSELSVLAGGGGSGGGGSGGGGSGGGGSGEVQLLESGGGLVQPGGSLRLSCAASGFTFSSYAMSWVRQAPGKGLEWVSGISGSGGFTYYADSVKGRFTISRDNSKNTLYLQMNSLRAEDTAVYYCAKPPRGYNYGPFDYWGQGTLVTVSSASTKGPSVFPLAPCSRSTSESTAALGCLVKDYFPEPVTVSWNSGALTSGVHTFPAVLQSSGLYSLSSVVTVPSSSLGTKTYTCNVDHKPSNTKVDKRVESKYGPPCPPCPAPEFLGGPSVFLFPPKPKDTLMISRTPEVTCVVVDVSQEDPEVQFNWYVDGVEVHNAKTKPREEQFNSTYRVVSVLTVLHQDWLNGKEYKCKVSNKGLPSSIEKTISKAKGQPREPQVYTLPPSQEEMTKNQVSLTCLVKGFYPSDIAVEWESNGQPENNYKTTPPVLDSDGSFFLYSRLTVDKSRWQEGNVFSCSVMHEALHNHYTQKSLSLSLGK

SEQ ID NO: 542 - protein, 580 aa, synthetic construct
  REGION 1..580: note = CD86 IgV-A13M/Q25I/F33L/H90I-sugemalimab antibody heavy chain
APLKIQAYFNETMDLPCQFANSQNISLSELVVLWQDQENLVLNEVYLGKEKFDSVHSKYMGRTSFDSDSWTLRLHNLQIKDKGLYQCIIIHKKPTGMIRIHQMNSELSVLAGGGGSGGGGSGGGGSGGGGSGEVQLLESGGGLVQPGGSLRLSCAASGFTFSSYAMSWVRQAPGKGLEWVSGISGSGGFTYYADSVKGRFTISRDNSKNTLYLQMNSLRAEDTAVYYCAKPPRGYNYGPFDYWGQGTLVTVSSASTKGPSVFPLAPCSRSTSESTAALGCLVKDYFPEPVTVSWNSGALTSGVHTFPAVLQSSGLYSLSSVVTVPSSSLGTKTYTCNVDHKPSNTKVDKRVESKYGPPCPPCPAPEFLGGPSVFLFPPKPKDTLMISRTPEVTCVVVDVSQEDPEVQFNWYVDGVEVHNAKTKPREEQFNSTYRVVSVLTVLHQDWLNGKEYKCKVSNKGLPSSIEKTISKAKGQPREPQVYTLPPSQEEMTKNQVSLTCLVKGFYPSDIAVEWESNGQPENNYKTTPPVLDSDGSFFLYSRLTVDKSRWQEGNVFSCSVMHEALHNHYTQKSLSLSLGK

SEQ ID NO: 543 - protein, 580 aa, synthetic construct
  REGION 1..580: note = CD86 IgV-Q25A/F33L/H90I-sugemalimab antibody heavy chain
APLKIQAYFNETADLPCQFANSQNASLSELVVLWQDQENLVLNEVYLGKEKFDSVHSKYMGRTSFDSDSWTLRLHNLQIKDKGLYQCIIIHKKPTGMIRIHQMNSELSVLAGGGGSGGGGSGGGGSGGGGSGEVQLLESGGGLVQPGGSLRLSCAASGFTFSSYAMSWVRQAPGKGLEWVSGISGSGGFTYYADSVKGRFTISRDNSKNTLYLQMNSLRAEDTAVYYCAKPPRGYNYGPFDYWGQGTLVTVSSASTKGPSVFPLAPCSRSTSESTAALGCLVKDYFPEPVTVSWNSGALTSGVHTFPAVLQSSGLYSLSSVVTVPSSSLGTKTYTCNVDHKPSNTKVDKRVESKYGPPCPPCPAPEFLGGPSVFLFPPKPKDTLMISRTPEVTCVVVDVSQEDPEVQFNWYVDGVEVHNAKTKPREEQFNSTYRVVSVLTVLHQDWLNGKEYKCKVSNKGLPSSIEKTISKAKGQPREPQVYTLPPSQEEMTKNQVSLTCLVKGFYPSDIAVEWESNGQPENNYKTTPPVLDSDGSFFLYSRLTVDKSRWQEGNVFSCSVMHEALHNHYTQKSLSLSLGK

SEQ ID NO: 544 - protein, 580 aa, synthetic construct
  REGION 1..580: note = CD86 IgV-Q25M/F33L/H90I-sugemalimab antibody heavy chain
APLKIQAYFNETADLPCQFANSQNMSLSELVVLWQDQENLVLNEVYLGKEKFDSVHSKYMGRTSFDSDSWTLRLHNLQIKDKGLYQCIIIHKKPTGMIRIHQMNSELSVLAGGGGSGGGGSGGGGSGGGGSGEVQLLESGGGLVQPGGSLRLSCAASGFTFSSYAMSWVRQAPGKGLEWVSGISGSGGFTYYADSVKGRFTISRDNSKNTLYLQMNSLRAEDTAVYYCAKPPRGYNYGPFDYWGQGTLVTVSSASTKGPSVFPLAPCSRSTSESTAALGCLVKDYFPEPVTVSWNSGALTSGVHTFPAVLQSSGLYSLSSVVTVPSSSLGTKTYTCNVDHKPSNTKVDKRVESKYGPPCPPCPAPEFLGGPSVFLFPPKPKDTLMISRTPEVTCVVVDVSQEDPEVQFNWYVDGVEVHNAKTKPREEQFNSTYRVVSVLTVLHQDWLNGKEYKCKVSNKGLPSSIEKTISKAKGQPREPQVYTLPPSQEEMTKNQVSLTCLVKGFYPSDIAVEWESNGQPENNYKTTPPVLDSDGSFFLYSRLTVDKSRWQEGNVFSCSVMHEALHNHYTQKSLSLSLGK

SEQ ID NO: 545 - protein, 580 aa, synthetic construct
  REGION 1..580: note = CD86 IgV-Q25I/F33M/H90I-sugemalimab antibody heavy chain
APLKIQAYFNETADLPCQFANSQNISLSELVVMWQDQENLVLNEVYLGKEKFDSVHSKYMGRTSFDSDSWTLRLHNLQIKDKGLYQCIIIHKKPTGMIRIHQMNSELSVLAGGGGSGGGGSGGGGSGGGGSGEVQLLESGGGLVQPGGSLRLSCAASGFTFSSYAMSWVRQAPGKGLEWVSGISGSGGFTYYADSVKGRFTISRDNSKNTLYLQMNSLRAEDTAVYYCAKPPRGYNYGPFDYWGQGTLVTVSSASTKGPSVFPLAPCSRSTSESTAALGCLVKDYFPEPVTVSWNSGALTSGVHTFPAVLQSSGLYSLSSVVTVPSSSLGTKTYTCNVDHKPSNTKVDKRVESKYGPPCPPCPAPEFLGGPSVFLFPPKPKDTLMISRTPEVTCVVVDVSQEDPEVQFNWYVDGVEVHNAKTKPREEQFNSTYRVVSVLTVLHQDWLNGKEYKCKVSNKGLPSSIEKTISKAKGQPREPQVYTLPPSQEEMTKNQVSLTCLVKGFYPSDIAVEWESNGQPENNYKTTPPVLDSDGSFFLYSRLTVDKSRWQEGNVFSCSVMHEALHNHYTQKSLSLSLGK

SEQ ID NO: 546 - protein, 580 aa, synthetic construct
  REGION 1..580: note = CD86 IgV-Q25I/F33L/I89V/H90I-sugemalimab antibody heavy chain
APLKIQAYFNETADLPCQFANSQNISLSELVVLWQDQENLVLNEVYLGKEKFDSVHSKYMGRTSFDSDSWTLRLHNLQIKDKGLYQCIVIHKKPTGMIRIHQMNSELSVLAGGGGSGGGGSGGGGSGGGGSGEVQLLESGGGLVQPGGSLRLSCAASGFTFSSYAMSWVRQAPGKGLEWVSGISGSGGFTYYADSVKGRFTISRDNSKNTLYLQMNSLRAEDTAVYYCAKPPRGYNYGPFDYWGQGTLVTVSSASTKGPSVFPLAPCSRSTSESTAALGCLVKDYFPEPVTVSWNSGALTSGVHTFPAVLQSSGLYSLSSVVTVPSSSLGTKTYTCNVDHKPSNTKVDKRVESKYGPPCPPCPAPEFLGGPSVFLFPPKPKDTLMISRTPEVTCVVVDVSQEDPEVQFNWYVDGVEVHNAKTKPREEQFNSTYRVVSVLTVLHQDWLNGKEYKCKVSNKGLPSSIEKTISKAKGQPREPQVYTLPPSQEEMTKNQVSLTCLVKGFYPSDIAVEWESNGQPENNYKTTPPVLDSDGSFFLYSRLTVDKSRWQEGNVFSCSVMHEALHNHYTQKSLSLSLGK

SEQ ID NO: 547 - protein, 580 aa, synthetic construct
  REGION 1..580: note = CD86 IgV-Q25I/F33L/I89F/H90I-sugemalimab antibody heavy chain
APLKIQAYFNETADLPCQFANSQNISLSELVVLWQDQENLVLNEVYLGKEKFDSVHSKYMGRTSFDSDSWTLRLHNLQIKDKGLYQCIFIHKKPTGMIRIHQMNSELSVLAGGGGSGGGGSGGGGSGGGGSGEVQLLESGGGLVQPGGSLRLSCAASGFTFSSYAMSWVRQAPGKGLEWVSGISGSGGFTYYADSVKGRFTISRDNSKNTLYLQMNSLRAEDTAVYYCAKPPRGYNYGPFDYWGQGTLVTVSSASTKGPSVFPLAPCSRSTSESTAALGCLVKDYFPEPVTVSWNSGALTSGVHTFPAVLQSSGLYSLSSVVTVPSSSLGTKTYTCNVDHKPSNTKVDKRVESKYGPPCPPCPAPEFLGGPSVFLFPPKPKDTLMISRTPEVTCVVVDVSQEDPEVQFNWYVDGVEVHNAKTKPREEQFNSTYRVVSVLTVLHQDWLNGKEYKCKVSNKGLPSSIEKTISKAKGQPREPQVYTLPPSQEEMTKNQVSLTCLVKGFYPSDIAVEWESNGQPENNYKTTPPVLDSDGSFFLYSRLTVDKSRWQEGNVFSCSVMHEALHNHYTQKSLSLSLGK

SEQ ID NO: 548 - protein, 580 aa, synthetic construct
  REGION 1..580: note = CD86 IgV-Q25I/F33L/I89M/H90I-sugemalimab antibody heavy chain
APLKIQAYFNETADLPCQFANSQNISLSELVVLWQDQENLVLNEVYLGKEKFDSVHSKYMGRTSFDSDSWTLRLHNLQIKDKGLYQCIMIHKKPTGMIRIHQMNSELSVLAGGGGSGGGGSGGGGSGGGGSGEVQLLESGGGLVQPGGSLRLSCAASGFTFSSYAMSWVRQAPGKGLEWVSGISGSGGFTYYADSVKGRFTISRDNSKNTLYLQMNSLRAEDTAVYYCAKPPRGYNYGPFDYWGQGTLVTVSSASTKGPSVFPLAPCSRSTSESTAALGCLVKDYFPEPVTVSWNSGALTSGVHTFPAVLQSSGLYSLSSVVTVPSSSLGTKTYTCNVDHKPSNTKVDKRVESKYGPPCPPCPAPEFLGGPSVFLFPPKPKDTLMISRTPEVTCVVVDVSQEDPEVQFNWYVDGVEVHNAKTKPREEQFNSTYRVVSVLTVLHQDWLNGKEYKCKVSNKGLPSSIEKTISKAKGQPREPQVYTLPPSQEEMTKNQVSLTCLVKGFYPSDIAVEWESNGQPENNYKTTPPVLDSDGSFFLYSRLTVDKSRWQEGNVFSCSVMHEALHNHYTQKSLSLSLGK

SEQ ID NO: 549 - protein, 580 aa, synthetic construct
  REGION 1..580: note = CD86 IgV-Q25I/F33L/H90M-sugemalimab antibody heavy chain
APLKIQAYFNETADLPCQFANSQNISLSELVVLWQDQENLVLNEVYLGKEKFDSVHSKYMGRTSFDSDSWTLRLHNLQIKDKGLYQCIIMHKKPTGMIRIHQMNSELSVLAGGGGSGGGGSGGGGSGGGGSGEVQLLESGGGLVQPGGSLRLSCAASGFTFSSYAMSWVRQAPGKGLEWVSGISGSGGFTYYADSVKGRFTISRDNSKNTLYLQMNSLRAEDTAVYYCAKPPRGYNYGPFDYWGQGTLVTVSSASTKGPSVFPLAPCSRSTSESTAALGCLVKDYFPEPVTVSWNSGALTSGVHTFPAVLQSSGLYSLSSVVTVPSSSLGTKTYTCNVDHKPSNTKVDKRVESKYGPPCPPCPAPEFLGGPSVFLFPPKPKDTLMISRTPEVTCVVVDVSQEDPEVQFNWYVDGVEVHNAKTKPREEQFNSTYRVVSVLTVLHQDWLNGKEYKCKVSNKGLPSSIEKTISKAKGQPREPQVYTLPPSQEEMTKNQVSLTCLVKGFYPSDIAVEWESNGQPENNYKTTPPVLDSDGSFFLYSRLTVDKSRWQEGNVFSCSVMHEALHNHYTQKSLSLSLGK

SEQ ID NO: 550 - protein, 579 aa, synthetic construct
  REGION 1..579: note = atezolizumab antibody heavy chain -CD86 IgV-Q25I/F33L/H90I
EVQLVESGGGLVQPGGSLRLSCAASGFTFSDSWIHWVRQAPGKGLEWVAWISPYGGSTYYADSVKGRFTISADTSKNTAYLQMNSLRAEDTAVYYCARRHWPGGFDYWGQGTLVTVSSASTKGPSVFPLAPSSKSTSGGTAALGCLVKDYFPEPVTVSWNSGALTSGVHTFPAVLQSSGLYSLSSVVTVPSSSLGTQTYICNVNHKPSNTKVDKKVEPKSCDKTHTCPPCPAPELLGGPSVFLFPPKPKDTLMISRTPEVTCVVVDVSHEDPEVKFNWYVDGVEVHNAKTKPREEQYASTYRVVSVLTVLHQDWLNGKEYKCKVSNKALPAPIEKTISKAKGQPREPQVYTLPPSREEMTKNQVSLTCLVKGFYPSDIAVEWESNGQPENNYKTTPPVLDSDGSFFLYSKLTVDKSRWQQGNVFSCSVMHEALHNHYTQKSLSLSPGAGGGGSGGGGSGGGGSGGGGSGAPLKIQAYFNETADLPCQFANSQNISLSELVVLWQDQENLVLNEVYLGKEKFDSVHSKYMGRTSFDSDSWTLRLHNLQIKDKGLYQCIIIHKKPTGMIRIHQMNSELSVL

SEQ ID NO: 551 - protein, 579 aa, synthetic construct
  REGION 1..579: note = atezolizumab antibody heavy chain -CD86 IgV-Q25V/F33L/H90I
EVQLVESGGGLVQPGGSLRLSCAASGFTFSDSWIHWVRQAPGKGLEWVAWISPYGGSTYYADSVKGRFTISADTSKNTAYLQMNSLRAEDTAVYYCARRHWPGGFDYWGQGTLVTVSSASTKGPSVFPLAPSSKSTSGGTAALGCLVKDYFPEPVTVSWNSGALTSGVHTFPAVLQSSGLYSLSSVVTVPSSSLGTQTYICNVNHKPSNTKVDKKVEPKSCDKTHTCPPCPAPELLGGPSVFLFPPKPKDTLMISRTPEVTCVVVDVSHEDPEVKFNWYVDGVEVHNAKTKPREEQYASTYRVVSVLTVLHQDWLNGKEYKCKVSNKALPAPIEKTISKAKGQPREPQVYTLPPSREEMTKNQVSLTCLVKGFYPSDIAVEWESNGQPENNYKTTPPVLDSDGSFFLYSKLTVDKSRWQQGNVFSCSVMHEALHNHYTQKSLSLSPGAGGGGSGGGGSGGGGSGGGGSGAPLKIQAYFNETADLPCQFANSQNVSLSELVVLWQDQENLVLNEVYLGKEKFDSVHSKYMGRTSFDSDSWTLRLHNLQIKDKGLYQCIIIHKKPTGMIRIHQMNSELSVL

SEQ ID NO: 552 - protein, 579 aa, synthetic construct
  REGION 1..579: note = atezolizumab antibody heavy chain -CD86 IgV-Q25I/F33V/H90I
EVQLVESGGGLVQPGGSLRLSCAASGFTFSDSWIHWVRQAPGKGLEWVAWISPYGGSTYYADSVKGRFTISADTSKNTAYLQMNSLRAEDTAVYYCARRHWPGGFDYWGQGTLVTVSSASTKGPSVFPLAPSSKSTSGGTAALGCLVKDYFPEPVTVSWNSGALTSGVHTFPAVLQSSGLYSLSSVVTVPSSSLGTQTYICNVNHKPSNTKVDKKVEPKSCDKTHTCPPCPAPELLGGPSVFLFPPKPKDTLMISRTPEVTCVVVDVSHEDPEVKFNWYVDGVEVHNAKTKPREEQYASTYRVVSVLTVLHQDWLNGKEYKCKVSNKALPAPIEKTISKAKGQPREPQVYTLPPSREEMTKNQVSLTCLVKGFYPSDIAVEWESNGQPENNYKTTPPVLDSDGSFFLYSKLTVDKSRWQQGNVFSCSVMHEALHNHYTQKSLSLSPGAGGGGSGGGGSGGGGSGGGGSGAPLKIQAYFNETADLPCQFANSQNISLSELVVVWQDQENLVLNEVYLGKEKFDSVHSKYMGRTSFDSDSWTLRLHNLQIKDKGLYQCIIIHKKPTGMIRIHQMNSELSVL

SEQ ID NO: 553 - protein, 579 aa, synthetic construct
  REGION 1..579: note = atezolizumab antibody heavy chain -CD86 IgV-Q25V/F33V/H90I
EVQLVESGGGLVQPGGSLRLSCAASGFTFSDSWIHWVRQAPGKGLEWVAWISPYGGSTYYADSVKGRFTISADTSKNTAYLQMNSLRAEDTAVYYCARRHWPGGFDYWGQGTLVTVSSASTKGPSVFPLAPSSKSTSGGTAALGCLVKDYFPEPVTVSWNSGALTSGVHTFPAVLQSSGLYSLSSVVTVPSSSLGTQTYICNVNHKPSNTKVDKKVEPKSCDKTHTCPPCPAPELLGGPSVFLFPPKPKDTLMISRTPEVTCVVVDVSHEDPEVKFNWYVDGVEVHNAKTKPREEQYASTYRVVSVLTVLHQDWLNGKEYKCKVSNKALPAPIEKTISKAKGQPREPQVYTLPPSREEMTKNQVSLTCLVKGFYPSDIAVEWESNGQPENNYKTTPPVLDSDGSFFLYSKLTVDKSRWQQGNVFSCSVMHEALHNHYTQKSLSLSPGAGGGGSGGGGSGGGGSGGGGSGAPLKIQAYFNETADLPCQFANSQNVSLSELVVVWQDQENLVLNEVYLGKEKFDSVHSKYMGRTSFDSDSWTLRLHNLQIKDKGLYQCIIIHKKPTGMIRIHQMNSELSVL

SEQ ID NO: 554 - protein, 579 aa, synthetic construct
  REGION 1..579: note = atezolizumab antibody heavy chain -CD86 IgV-Q25I/F33L/H90V
EVQLVESGGGLVQPGGSLRLSCAASGFTFSDSWIHWVRQAPGKGLEWVAWISPYGGSTYYADSVKGRFTISADTSKNTAYLQMNSLRAEDTAVYYCARRHWPGGFDYWGQGTLVTVSSASTKGPSVFPLAPSSKSTSGGTAALGCLVKDYFPEPVTVSWNSGALTSGVHTFPAVLQSSGLYSLSSVVTVPSSSLGTQTYICNVNHKPSNTKVDKKVEPKSCDKTHTCPPCPAPELLGGPSVFLFPPKPKDTLMISRTPEVTCVVVDVSHEDPEVKFNWYVDGVEVHNAKTKPREEQYASTYRVVSVLTVLHQDWLNGKEYKCKVSNKALPAPIEKTISKAKGQPREPQVYTLPPSREEMTKNQVSLTCLVKGFYPSDIAVEWESNGQPENNYKTTPPVLDSDGSFFLYSKLTVDKSRWQQGNVFSCSVMHEALHNHYTQKSLSLSPGAGGGGSGGGGSGGGGSGGGGSGAPLKIQAYFNETADLPCQFANSQNISLSELVVLWQDQENLVLNEVYLGKEKFDSVHSKYMGRTSFDSDSWTLRLHNLQIKDKGLYQCIIVHKKPTGMIRIHQMNSELSVL

SEQ ID NO: 555 - protein, 579 aa, synthetic construct
  REGION 1..579: note = atezolizumab antibody heavy chain -CD86 IgV-Q25V/F33L/H90V
EVQLVESGGGLVQPGGSLRLSCAASGFTFSDSWIHWVRQAPGKGLEWVAWISPYGGSTYYADSVKGRFTISADTSKNTAYLQMNSLRAEDTAVYYCARRHWPGGFDYWGQGTLVTVSSASTKGPSVFPLAPSSKSTSGGTAALGCLVKDYFPEPVTVSWNSGALTSGVHTFPAVLQSSGLYSLSSVVTVPSSSLGTQTYICNVNHKPSNTKVDKKVEPKSCDKTHTCPPCPAPELLGGPSVFLFPPKPKDTLMISRTPEVTCVVVDVSHEDPEVKFNWYVDGVEVHNAKTKPREEQYASTYRVVSVLTVLHQDWLNGKEYKCKVSNKALPAPIEKTISKAKGQPREPQVYTLPPSREEMTKNQVSLTCLVKGFYPSDIAVEWESNGQPENNYKTTPPVLDSDGSFFLYSKLTVDKSRWQQGNVFSCSVMHEALHNHYTQKSLSLSPGAGGGGSGGGGSGGGGSGGGGSGAPLKIQAYFNETADLPCQFANSQNVSLSELVVLWQDQENLVLNEVYLGKEKFDSVHSKYMGRTSFDSDSWTLRLHNLQIKDKGLYQCIIVHKKPTGMIRIHQMNSELSVL

SEQ ID NO: 556 - protein, 579 aa, synthetic construct
  REGION 1..579: note = atezolizumab antibody heavy chain -CD86 IgV-Q25I/F33V/H90V
EVQLVESGGGLVQPGGSLRLSCAASGFTFSDSWIHWVRQAPGKGLEWVAWISPYGGSTYYADSVKGRFTISADTSKNTAYLQMNSLRAEDTAVYYCARRHWPGGFDYWGQGTLVTVSSASTKGPSVFPLAPSSKSTSGGTAALGCLVKDYFPEPVTVSWNSGALTSGVHTFPAVLQSSGLYSLSSVVTVPSSSLGTQTYICNVNHKPSNTKVDKKVEPKSCDKTHTCPPCPAPELLGGPSVFLFPPKPKDTLMISRTPEVTCVVVDVSHEDPEVKFNWYVDGVEVHNAKTKPREEQYASTYRVVSVLTVLHQDWLNGKEYKCKVSNKALPAPIEKTISKAKGQPREPQVYTLPPSREEMTKNQVSLTCLVKGFYPSDIAVEWESNGQPENNYKTTPPVLDSDGSFFLYSKLTVDKSRWQQGNVFSCSVMHEALHNHYTQKSLSLSPGAGGGGSGGGGSGGGGSGGGGSGAPLKIQAYFNETADLPCQFANSQNISLSELVVVWQDQENLVLNEVYLGKEKFDSVHSKYMGRTSFDSDSWTLRLHNLQIKDKGLYQCIIVHKKPTGMIRIHQMNSELSVL

SEQ ID NO: 557 - protein, 579 aa, synthetic construct
  REGION 1..579: note = atezolizumab antibody heavy chain -CD86 IgV-Q25V/F33V/H90V
EVQLVESGGGLVQPGGSLRLSCAASGFTFSDSWIHWVRQAPGKGLEWVAWISPYGGSTYYADSVKGRFTISADTSKNTAYLQMNSLRAEDTAVYYCARRHWPGGFDYWGQGTLVTVSSASTKGPSVFPLAPSSKSTSGGTAALGCLVKDYFPEPVTVSWNSGALTSGVHTFPAVLQSSGLYSLSSVVTVPSSSLGTQTYICNVNHKPSNTKVDKKVEPKSCDKTHTCPPCPAPELLGGPSVFLFPPKPKDTLMISRTPEVTCVVVDVSHEDPEVKFNWYVDGVEVHNAKTKPREEQYASTYRVVSVLTVLHQDWLNGKEYKCKVSNKALPAPIEKTISKAKGQPREPQVYTLPPSREEMTKNQVSLTCLVKGFYPSDIAVEWESNGQPENNYKTTPPVLDSDGSFFLYSKLTVDKSRWQQGNVFSCSVMHEALHNHYTQKSLSLSPGAGGGGSGGGGSGGGGSGGGGSGAPLKIQAYFNETADLPCQFANSQNVSLSELVVVWQDQENLVLNEVYLGKEKFDSVHSKYMGRTSFDSDSWTLRLHNLQIKDKGLYQCIIVHKKPTGMIRIHQMNSELSVL

SEQ ID NO: 558 - protein, 579 aa, synthetic construct
  REGION 1..579: note = atezolizumab antibody heavy chain -CD86 IgV-A13L/Q25I/F33L/H90I
EVQLVESGGGLVQPGGSLRLSCAASGFTFSDSWIHWVRQAPGKGLEWVAWISPYGGSTYYADSVKGRFTISADTSKNTAYLQMNSLRAEDTAVYYCARRHWPGGFDYWGQGTLVTVSSASTKGPSVFPLAPSSKSTSGGTAALGCLVKDYFPEPVTVSWNSGALTSGVHTFPAVLQSSGLYSLSSVVTVPSSSLGTQTYICNVNHKPSNTKVDKKVEPKSCDKTHTCPPCPAPELLGGPSVFLFPPKPKDTLMISRTPEVTCVVVDVSHEDPEVKFNWYVDGVEVHNAKTKPREEQYASTYRVVSVLTVLHQDWLNGKEYKCKVSNKALPAPIEKTISKAKGQPREPQVYTLPPSREEMTKNQVSLTCLVKGFYPSDIAVEWESNGQPENNYKTTPPVLDSDGSFFLYSKLTVDKSRWQQGNVFSCSVMHEALHNHYTQKSLSLSPGAGGGGSGGGGSGGGGSGGGGSGAPLKIQAYFNETLDLPCQFANSQNISLSELVVLWQDQENLVLNEVYLGKEKFDSVHSKYMGRTSFDSDSWTLRLHNLQIKDKGLYQCIIIHKKPTGMIRIHQMNSELSVL

SEQ ID NO: 559 - protein, 579 aa, synthetic construct
  REGION 1..579: note = atezolizumab antibody heavy chain -CD86 IgV-A13I/Q25I/F33L/H90I
EVQLVESGGGLVQPGGSLRLSCAASGFTFSDSWIHWVRQAPGKGLEWVAWISPYGGSTYYADSVKGRFTISADTSKNTAYLQMNSLRAEDTAVYYCARRHWPGGFDYWGQGTLVTVSSASTKGPSVFPLAPSSKSTSGGTAALGCLVKDYFPEPVTVSWNSGALTSGVHTFPAVLQSSGLYSLSSVVTVPSSSLGTQTYICNVNHKPSNTKVDKKVEPKSCDKTHTCPPCPAPELLGGPSVFLFPPKPKDTLMISRTPEVTCVVVDVSHEDPEVKFNWYVDGVEVHNAKTKPREEQYASTYRVVSVLTVLHQDWLNGKEYKCKVSNKALPAPIEKTISKAKGQPREPQVYTLPPSREEMTKNQVSLTCLVKGFYPSDIAVEWESNGQPENNYKTTPPVLDSDGSFFLYSKLTVDKSRWQQGNVFSCSVMHEALHNHYTQKSLSLSPGAGGGGSGGGGSGGGGSGGGGSGAPLKIQAYFNETIDLPCQFANSQNISLSELVVLWQDQENLVLNEVYLGKEKFDSVHSKYMGRTSFDSDSWTLRLHNLQIKDKGLYQCIIIHKKPTGMIRIHQMNSELSVL

SEQ ID NO: 560 - protein, 579 aa, synthetic construct
  REGION 1..579: note = atezolizumab antibody heavy chain -CD86 IgV-A13L/Q25V/F33L/H90I
EVQLVESGGGLVQPGGSLRLSCAASGFTFSDSWIHWVRQAPGKGLEWVAWISPYGGSTYYADSVKGRFTISADTSKNTAYLQMNSLRAEDTAVYYCARRHWPGGFDYWGQGTLVTVSSASTKGPSVFPLAPSSKSTSGGTAALGCLVKDYFPEPVTVSWNSGALTSGVHTFPAVLQSSGLYSLSSVVTVPSSSLGTQTYICNVNHKPSNTKVDKKVEPKSCDKTHTCPPCPAPELLGGPSVFLFPPKPKDTLMISRTPEVTCVVVDVSHEDPEVKFNWYVDGVEVHNAKTKPREEQYASTYRVVSVLTVLHQDWLNGKEYKCKVSNKALPAPIEKTISKAKGQPREPQVYTLPPSREEMTKNQVSLTCLVKGFYPSDIAVEWESNGQPENNYKTTPPVLDSDGSFFLYSKLTVDKSRWQQGNVFSCSVMHEALHNHYTQKSLSLSPGAGGGGSGGGGSGGGGSGGGGSGAPLKIQAYFNETLDLPCQFANSQNVSLSELVVLWQDQENLVLNEVYLGKEKFDSVHSKYMGRTSFDSDSWTLRLHNLQIKDKGLYQCIIIHKKPTGMIRIHQMNSELSVL

SEQ ID NO: 561 - protein, 579 aa, synthetic construct
  REGION 1..579: note = atezolizumab antibody heavy chain -CD86 IgV-A13I/Q25V/F33L/H90I
EVQLVESGGGLVQPGGSLRLSCAASGFTFSDSWIHWVRQAPGKGLEWVAWISPYGGSTYYADSVKGRFTISADTSKNTAYLQMNSLRAEDTAVYYCARRHWPGGFDYWGQGTLVTVSSASTKGPSVFPLAPSSKSTSGGTAALGCLVKDYFPEPVTVSWNSGALTSGVHTFPAVLQSSGLYSLSSVVTVPSSSLGTQTYICNVNHKPSNTKVDKKVEPKSCDKTHTCPPCPAPELLGGPSVFLFPPKPKDTLMISRTPEVTCVVVDVSHEDPEVKFNWYVDGVEVHNAKTKPREEQYASTYRVVSVLTVLHQDWLNGKEYKCKVSNKALPAPIEKTISKAKGQPREPQVYTLPPSREEMTKNQVSLTCLVKGFYPSDIAVEWESNGQPENNYKTTPPVLDSDGSFFLYSKLTVDKSRWQQGNVFSCSVMHEALHNHYTQKSLSLSPGAGGGGSGGGGSGGGGSGGGGSGAPLKIQAYFNETIDLPCQFANSQNVSLSELVVLWQDQENLVLNEVYLGKEKFDSVHSKYMGRTSFDSDSWTLRLHNLQIKDKGLYQCIIIHKKPTGMIRIHQMNSELSVL

SEQ ID NO: 562 - protein, 579 aa, synthetic construct
  REGION 1..579: note = atezolizumab antibody heavy chain -CD86 IgV-Q25I/F33L/I89L/H90I
EVQLVESGGGLVQPGGSLRLSCAASGFTFSDSWIHWVRQAPGKGLEWVAWISPYGGSTYYADSVKGRFTISADTSKNTAYLQMNSLRAEDTAVYYCARRHWPGGFDYWGQGTLVTVSSASTKGPSVFPLAPSSKSTSGGTAALGCLVKDYFPEPVTVSWNSGALTSGVHTFPAVLQSSGLYSLSSVVTVPSSSLGTQTYICNVNHKPSNTKVDKKVEPKSCDKTHTCPPCPAPELLGGPSVFLFPPKPKDTLMISRTPEVTCVVVDVSHEDPEVKFNWYVDGVEVHNAKTKPREEQYASTYRVVSVLTVLHQDWLNGKEYKCKVSNKALPAPIEKTISKAKGQPREPQVYTLPPSREEMTKNQVSLTCLVKGFYPSDIAVEWESNGQPENNYKTTPPVLDSDGSFFLYSKLTVDKSRWQQGNVFSCSVMHEALHNHYTQKSLSLSPGAGGGGSGGGGSGGGGSGGGGSGAPLKIQAYFNETADLPCQFANSQNISLSELVVLWQDQENLVLNEVYLGKEKFDSVHSKYMGRTSFDSDSWTLRLHNLQIKDKGLYQCILIHKKPTGMIRIHQMNSELSVL

SEQ ID NO: 563 - protein, 579 aa, synthetic construct
  REGION 1..579: note = atezolizumab antibody heavy chain -CD86 IgV-Q25I/F33L/M60R/H90I
EVQLVESGGGLVQPGGSLRLSCAASGFTFSDSWIHWVRQAPGKGLEWVAWISPYGGSTYYADSVKGRFTISADTSKNTAYLQMNSLRAEDTAVYYCARRHWPGGFDYWGQGTLVTVSSASTKGPSVFPLAPSSKSTSGGTAALGCLVKDYFPEPVTVSWNSGALTSGVHTFPAVLQSSGLYSLSSVVTVPSSSLGTQTYICNVNHKPSNTKVDKKVEPKSCDKTHTCPPCPAPELLGGPSVFLFPPKPKDTLMISRTPEVTCVVVDVSHEDPEVKFNWYVDGVEVHNAKTKPREEQYASTYRVVSVLTVLHQDWLNGKEYKCKVSNKALPAPIEKTISKAKGQPREPQVYTLPPSREEMTKNQVSLTCLVKGFYPSDIAVEWESNGQPENNYKTTPPVLDSDGSFFLYSKLTVDKSRWQQGNVFSCSVMHEALHNHYTQKSLSLSPGAGGGGSGGGGSGGGGSGGGGSGAPLKIQAYFNETADLPCQFANSQNISLSELVVLWQDQENLVLNEVYLGKEKFDSVHSKYRGRTSFDSDSWTLRLHNLQIKDKGLYQCIIIHKKPTGMIRIHQMNSELSVL

SEQ ID NO: 564 - protein, 579 aa, synthetic construct
  REGION 1..579: note = atezolizumab antibody heavy chain -CD86 IgV-Q25V/F33L/I89L/H90I
EVQLVESGGGLVQPGGSLRLSCAASGFTFSDSWIHWVRQAPGKGLEWVAWISPYGGSTYYADSVKGRFTISADTSKNTAYLQMNSLRAEDTAVYYCARRHWPGGFDYWGQGTLVTVSSASTKGPSVFPLAPSSKSTSGGTAALGCLVKDYFPEPVTVSWNSGALTSGVHTFPAVLQSSGLYSLSSVVTVPSSSLGTQTYICNVNHKPSNTKVDKKVEPKSCDKTHTCPPCPAPELLGGPSVFLFPPKPKDTLMISRTPEVTCVVVDVSHEDPEVKFNWYVDGVEVHNAKTKPREEQYASTYRVVSVLTVLHQDWLNGKEYKCKVSNKALPAPIEKTISKAKGQPREPQVYTLPPSREEMTKNQVSLTCLVKGFYPSDIAVEWESNGQPENNYKTTPPVLDSDGSFFLYSKLTVDKSRWQQGNVFSCSVMHEALHNHYTQKSLSLSPGAGGGGSGGGGSGGGGSGGGGSGAPLKIQAYFNETADLPCQFANSQNVSLSELVVLWQDQENLVLNEVYLGKEKFDSVHSKYMGRTSFDSDSWTLRLHNLQIKDKGLYQCILIHKKPTGMIRIHQMNSELSVL

SEQ ID NO: 565 - protein, 579 aa, synthetic construct
  REGION 1..579: note = atezolizumab antibody heavy chain -CD86 IgV-Q25V/F33L/M60R/H90I
EVQLVESGGGLVQPGGSLRLSCAASGFTFSDSWIHWVRQAPGKGLEWVAWISPYGGSTYYADSVKGRFTISADTSKNTAYLQMNSLRAEDTAVYYCARRHWPGGFDYWGQGTLVTVSSASTKGPSVFPLAPSSKSTSGGTAALGCLVKDYFPEPVTVSWNSGALTSGVHTFPAVLQSSGLYSLSSVVTVPSSSLGTQTYICNVNHKPSNTKVDKKVEPKSCDKTHTCPPCPAPELLGGPSVFLFPPKPKDTLMISRTPEVTCVVVDVSHEDPEVKFNWYVDGVEVHNAKTKPREEQYASTYRVVSVLTVLHQDWLNGKEYKCKVSNKALPAPIEKTISKAKGQPREPQVYTLPPSREEMTKNQVSLTCLVKGFYPSDIAVEWESNGQPENNYKTTPPVLDSDGSFFLYSKLTVDKSRWQQGNVFSCSVMHEALHNHYTQKSLSLSPGAGGGGSGGGGSGGGGSGGGGSGAPLKIQAYFNETADLPCQFANSQNVSLSELVVLWQDQENLVLNEVYLGKEKFDSVHSKYRGRTSFDSDSWTLRLHNLQIKDKGLYQCIIIHKKPTGMIRIHQMNSELSVL

SEQ ID NO: 566 - protein, 579 aa, synthetic construct
  REGION 1..579: note = atezolizumab antibody heavy chain -CD86 IgV-Q25F/F33L/H90I
EVQLVESGGGLVQPGGSLRLSCAASGFTFSDSWIHWVRQAPGKGLEWVAWISPYGGSTYYADSVKGRFTISADTSKNTAYLQMNSLRAEDTAVYYCARRHWPGGFDYWGQGTLVTVSSASTKGPSVFPLAPSSKSTSGGTAALGCLVKDYFPEPVTVSWNSGALTSGVHTFPAVLQSSGLYSLSSVVTVPSSSLGTQTYICNVNHKPSNTKVDKKVEPKSCDKTHTCPPCPAPELLGGPSVFLFPPKPKDTLMISRTPEVTCVVVDVSHEDPEVKFNWYVDGVEVHNAKTKPREEQYASTYRVVSVLTVLHQDWLNGKEYKCKVSNKALPAPIEKTISKAKGQPREPQVYTLPPSREEMTKNQVSLTCLVKGFYPSDIAVEWESNGQPENNYKTTPPVLDSDGSFFLYSKLTVDKSRWQQGNVFSCSVMHEALHNHYTQKSLSLSPGAGGGGSGGGGSGGGGSGGGGSGAPLKIQAYFNETADLPCQFANSQNFSLSELVVLWQDQENLVLNEVYLGKEKFDSVHSKYMGRTSFDSDSWTLRLHNLQIKDKGLYQCIIIHKKPTGMIRIHQMNSELSVL

SEQ ID NO: 567 - protein, 579 aa, synthetic construct
  REGION 1..579: note = atezolizumab antibody heavy chain -CD86 IgV-Q25I/F33L/H90F
EVQLVESGGGLVQPGGSLRLSCAASGFTFSDSWIHWVRQAPGKGLEWVAWISPYGGSTYYADSVKGRFTISADTSKNTAYLQMNSLRAEDTAVYYCARRHWPGGFDYWGQGTLVTVSSASTKGPSVFPLAPSSKSTSGGTAALGCLVKDYFPEPVTVSWNSGALTSGVHTFPAVLQSSGLYSLSSVVTVPSSSLGTQTYICNVNHKPSNTKVDKKVEPKSCDKTHTCPPCPAPELLGGPSVFLFPPKPKDTLMISRTPEVTCVVVDVSHEDPEVKFNWYVDGVEVHNAKTKPREEQYASTYRVVSVLTVLHQDWLNGKEYKCKVSNKALPAPIEKTISKAKGQPREPQVYTLPPSREEMTKNQVSLTCLVKGFYPSDIAVEWESNGQPENNYKTTPPVLDSDGSFFLYSKLTVDKSRWQQGNVFSCSVMHEALHNHYTQKSLSLSPGAGGGGSGGGGSGGGGSGGGGSGAPLKIQAYFNETADLPCQFANSQNISLSELVVLWQDQENLVLNEVYLGKEKFDSVHSKYMGRTSFDSDSWTLRLHNLQIKDKGLYQCIIFHKKPTGMIRIHQMNSELSVL

SEQ ID NO: 568 - protein, 579 aa, synthetic construct
  REGION 1..579: note = atezolizumab antibody heavy chain -CD86 IgV-Q25I/F33A/H90I
EVQLVESGGGLVQPGGSLRLSCAASGFTFSDSWIHWVRQAPGKGLEWVAWISPYGGSTYYADSVKGRFTISADTSKNTAYLQMNSLRAEDTAVYYCARRHWPGGFDYWGQGTLVTVSSASTKGPSVFPLAPSSKSTSGGTAALGCLVKDYFPEPVTVSWNSGALTSGVHTFPAVLQSSGLYSLSSVVTVPSSSLGTQTYICNVNHKPSNTKVDKKVEPKSCDKTHTCPPCPAPELLGGPSVFLFPPKPKDTLMISRTPEVTCVVVDVSHEDPEVKFNWYVDGVEVHNAKTKPREEQYASTYRVVSVLTVLHQDWLNGKEYKCKVSNKALPAPIEKTISKAKGQPREPQVYTLPPSREEMTKNQVSLTCLVKGFYPSDIAVEWESNGQPENNYKTTPPVLDSDGSFFLYSKLTVDKSRWQQGNVFSCSVMHEALHNHYTQKSLSLSPGAGGGGSGGGGSGGGGSGGGGSGAPLKIQAYFNETADLPCQFANSQNISLSELVVAWQDQENLVLNEVYLGKEKFDSVHSKYMGRTSFDSDSWTLRLHNLQIKDKGLYQCIIIHKKPTGMIRIHQMNSELSVL

SEQ ID NO: 569 - protein, 579 aa, synthetic construct
  REGION 1..579: note = atezolizumab antibody heavy chain -CD86 IgV-Q25I/H90I
EVQLVESGGGLVQPGGSLRLSCAASGFTFSDSWIHWVRQAPGKGLEWVAWISPYGGSTYYADSVKGRFTISADTSKNTAYLQMNSLRAEDTAVYYCARRHWPGGFDYWGQGTLVTVSSASTKGPSVFPLAPSSKSTSGGTAALGCLVKDYFPEPVTVSWNSGALTSGVHTFPAVLQSSGLYSLSSVVTVPSSSLGTQTYICNVNHKPSNTKVDKKVEPKSCDKTHTCPPCPAPELLGGPSVFLFPPKPKDTLMISRTPEVTCVVVDVSHEDPEVKFNWYVDGVEVHNAKTKPREEQYASTYRVVSVLTVLHQDWLNGKEYKCKVSNKALPAPIEKTISKAKGQPREPQVYTLPPSREEMTKNQVSLTCLVKGFYPSDIAVEWESNGQPENNYKTTPPVLDSDGSFFLYSKLTVDKSRWQQGNVFSCSVMHEALHNHYTQKSLSLSPGAGGGGSGGGGSGGGGSGGGGSGAPLKIQAYFNETADLPCQFANSQNISLSELVVFWQDQENLVLNEVYLGKEKFDSVHSKYMGRTSFDSDSWTLRLHNLQIKDKGLYQCIIIHKKPTGMIRIHQMNSELSVL

SEQ ID NO: 570 - protein, 579 aa, synthetic construct
  REGION 1..579: note = atezolizumab antibody heavy chain -CD86 IgV-Q25V/H90V
EVQLVESGGGLVQPGGSLRLSCAASGFTFSDSWIHWVRQAPGKGLEWVAWISPYGGSTYYADSVKGRFTISADTSKNTAYLQMNSLRAEDTAVYYCARRHWPGGFDYWGQGTLVTVSSASTKGPSVFPLAPSSKSTSGGTAALGCLVKDYFPEPVTVSWNSGALTSGVHTFPAVLQSSGLYSLSSVVTVPSSSLGTQTYICNVNHKPSNTKVDKKVEPKSCDKTHTCPPCPAPELLGGPSVFLFPPKPKDTLMISRTPEVTCVVVDVSHEDPEVKFNWYVDGVEVHNAKTKPREEQYASTYRVVSVLTVLHQDWLNGKEYKCKVSNKALPAPIEKTISKAKGQPREPQVYTLPPSREEMTKNQVSLTCLVKGFYPSDIAVEWESNGQPENNYKTTPPVLDSDGSFFLYSKLTVDKSRWQQGNVFSCSVMHEALHNHYTQKSLSLSPGAGGGGSGGGGSGGGGSGGGGSGAPLKIQAYFNETADLPCQFANSQNVSLSELVVFWQDQENLVLNEVYLGKEKFDSVHSKYMGRTSFDSDSWTLRLHNLQIKDKGLYQCIIVHKKPTGMIRIHQMNSELSVL

SEQ ID NO: 571 - protein, 579 aa, synthetic construct
  REGION 1..579: note = atezolizumab antibody heavy chain -CD86 IgV-Q25V/H90I
EVQLVESGGGLVQPGGSLRLSCAASGFTFSDSWIHWVRQAPGKGLEWVAWISPYGGSTYYADSVKGRFTISADTSKNTAYLQMNSLRAEDTAVYYCARRHWPGGFDYWGQGTLVTVSSASTKGPSVFPLAPSSKSTSGGTAALGCLVKDYFPEPVTVSWNSGALTSGVHTFPAVLQSSGLYSLSSVVTVPSSSLGTQTYICNVNHKPSNTKVDKKVEPKSCDKTHTCPPCPAPELLGGPSVFLFPPKPKDTLMISRTPEVTCVVVDVSHEDPEVKFNWYVDGVEVHNAKTKPREEQYASTYRVVSVLTVLHQDWLNGKEYKCKVSNKALPAPIEKTISKAKGQPREPQVYTLPPSREEMTKNQVSLTCLVKGFYPSDIAVEWESNGQPENNYKTTPPVLDSDGSFFLYSKLTVDKSRWQQGNVFSCSVMHEALHNHYTQKSLSLSPGAGGGGSGGGGSGGGGSGGGGSGAPLKIQAYFNETADLPCQFANSQNVSLSELVVFWQDQENLVLNEVYLGKEKFDSVHSKYMGRTSFDSDSWTLRLHNLQIKDKGLYQCIIIHKKPTGMIRIHQMNSELSVL

SEQ ID NO: 572 - protein, 579 aa, synthetic construct
  REGION 1..579: note = atezolizumab antibody heavy chain -CD86 IgV-Q25F/H90I
EVQLVESGGGLVQPGGSLRLSCAASGFTFSDSWIHWVRQAPGKGLEWVAWISPYGGSTYYADSVKGRFTISADTSKNTAYLQMNSLRAEDTAVYYCARRHWPGGFDYWGQGTLVTVSSASTKGPSVFPLAPSSKSTSGGTAALGCLVKDYFPEPVTVSWNSGALTSGVHTFPAVLQSSGLYSLSSVVTVPSSSLGTQTYICNVNHKPSNTKVDKKVEPKSCDKTHTCPPCPAPELLGGPSVFLFPPKPKDTLMISRTPEVTCVVVDVSHEDPEVKFNWYVDGVEVHNAKTKPREEQYASTYRVVSVLTVLHQDWLNGKEYKCKVSNKALPAPIEKTISKAKGQPREPQVYTLPPSREEMTKNQVSLTCLVKGFYPSDIAVEWESNGQPENNYKTTPPVLDSDGSFFLYSKLTVDKSRWQQGNVFSCSVMHEALHNHYTQKSLSLSPGAGGGGSGGGGSGGGGSGGGGSGAPLKIQAYFNETADLPCQFANSQNFSLSELVVFWQDQENLVLNEVYLGKEKFDSVHSKYMGRTSFDSDSWTLRLHNLQIKDKGLYQCIIIHKKPTGMIRIHQMNSELSVL

SEQ ID NO: 573 - protein, 579 aa, synthetic construct
  REGION 1..579: note = atezolizumab antibody heavy chain -CD86 IgV-Q25F/H90V
EVQLVESGGGLVQPGGSLRLSCAASGFTFSDSWIHWVRQAPGKGLEWVAWISPYGGSTYYADSVKGRFTISADTSKNTAYLQMNSLRAEDTAVYYCARRHWPGGFDYWGQGTLVTVSSASTKGPSVFPLAPSSKSTSGGTAALGCLVKDYFPEPVTVSWNSGALTSGVHTFPAVLQSSGLYSLSSVVTVPSSSLGTQTYICNVNHKPSNTKVDKKVEPKSCDKTHTCPPCPAPELLGGPSVFLFPPKPKDTLMISRTPEVTCVVVDVSHEDPEVKFNWYVDGVEVHNAKTKPREEQYASTYRVVSVLTVLHQDWLNGKEYKCKVSNKALPAPIEKTISKAKGQPREPQVYTLPPSREEMTKNQVSLTCLVKGFYPSDIAVEWESNGQPENNYKTTPPVLDSDGSFFLYSKLTVDKSRWQQGNVFSCSVMHEALHNHYTQKSLSLSPGAGGGGSGGGGSGGGGSGGGGSGAPLKIQAYFNETADLPCQFANSQNFSLSELVVFWQDQENLVLNEVYLGKEKFDSVHSKYMGRTSFDSDSWTLRLHNLQIKDKGLYQCIIVHKKPTGMIRIHQMNSELSVL

SEQ ID NO: 574 - protein, 579 aa, synthetic construct
  REGION 1..579: note = atezolizumab antibody heavy chain -CD86 IgV-A13F/Q25I/F33L/H90I
EVQLVESGGGLVQPGGSLRLSCAASGFTFSDSWIHWVRQAPGKGLEWVAWISPYGGSTYYADSVKGRFTISADTSKNTAYLQMNSLRAEDTAVYYCARRHWPGGFDYWGQGTLVTVSSASTKGPSVFPLAPSSKSTSGGTAALGCLVKDYFPEPVTVSWNSGALTSGVHTFPAVLQSSGLYSLSSVVTVPSSSLGTQTYICNVNHKPSNTKVDKKVEPKSCDKTHTCPPCPAPELLGGPSVFLFPPKPKDTLMISRTPEVTCVVVDVSHEDPEVKFNWYVDGVEVHNAKTKPREEQYASTYRVVSVLTVLHQDWLNGKEYKCKVSNKALPAPIEKTISKAKGQPREPQVYTLPPSREEMTKNQVSLTCLVKGFYPSDIAVEWESNGQPENNYKTTPPVLDSDGSFFLYSKLTVDKSRWQQGNVFSCSVMHEALHNHYTQKSLSLSPGAGGGGSGGGGSGGGGSGGGGSGAPLKIQAYFNETFDLPCQFANSQNISLSELVVLWQDQENLVLNEVYLGKEKFDSVHSKYMGRTSFDSDSWTLRLHNLQIKDKGLYQCIIIHKKPTGMIRIHQMNSELSVL

SEQ ID NO: 575 - protein, 579 aa, synthetic construct
  REGION 1..579: note = atezolizumab antibody heavy chain -CD86 IgV-A13M/Q25I/F33L/H90I
EVQLVESGGGLVQPGGSLRLSCAASGFTFSDSWIHWVRQAPGKGLEWVAWISPYGGSTYYADSVKGRFTISADTSKNTAYLQMNSLRAEDTAVYYCARRHWPGGFDYWGQGTLVTVSSASTKGPSVFPLAPSSKSTSGGTAALGCLVKDYFPEPVTVSWNSGALTSGVHTFPAVLQSSGLYSLSSVVTVPSSSLGTQTYICNVNHKPSNTKVDKKVEPKSCDKTHTCPPCPAPELLGGPSVFLFPPKPKDTLMISRTPEVTCVVVDVSHEDPEVKFNWYVDGVEVHNAKTKPREEQYASTYRVVSVLTVLHQDWLNGKEYKCKVSNKALPAPIEKTISKAKGQPREPQVYTLPPSREEMTKNQVSLTCLVKGFYPSDIAVEWESNGQPENNYKTTPPVLDSDGSFFLYSKLTVDKSRWQQGNVFSCSVMHEALHNHYTQKSLSLSPGAGGGGSGGGGSGGGGSGGGGSGAPLKIQAYFNETMDLPCQFANSQNISLSELVVLWQDQENLVLNEVYLGKEKFDSVHSKYMGRTSFDSDSWTLRLHNLQIKDKGLYQCIIIHKKPTGMIRIHQMNSELSVL

SEQ ID NO: 576 - protein, 579 aa, synthetic construct
  REGION 1..579: note = atezolizumab antibody heavy chain -CD86 IgV-Q25A/F33L/H90I
EVQLVESGGGLVQPGGSLRLSCAASGFTFSDSWIHWVRQAPGKGLEWVAWISPYGGSTYYADSVKGRFTISADTSKNTAYLQMNSLRAEDTAVYYCARRHWPGGFDYWGQGTLVTVSSASTKGPSVFPLAPSSKSTSGGTAALGCLVKDYFPEPVTVSWNSGALTSGVHTFPAVLQSSGLYSLSSVVTVPSSSLGTQTYICNVNHKPSNTKVDKKVEPKSCDKTHTCPPCPAPELLGGPSVFLFPPKPKDTLMISRTPEVTCVVVDVSHEDPEVKFNWYVDGVEVHNAKTKPREEQYASTYRVVSVLTVLHQDWLNGKEYKCKVSNKALPAPIEKTISKAKGQPREPQVYTLPPSREEMTKNQVSLTCLVKGFYPSDIAVEWESNGQPENNYKTTPPVLDSDGSFFLYSKLTVDKSRWQQGNVFSCSVMHEALHNHYTQKSLSLSPGAGGGGSGGGGSGGGGSGGGGSGAPLKIQAYFNETADLPCQFANSQNASLSELVVLWQDQENLVLNEVYLGKEKFDSVHSKYMGRTSFDSDSWTLRLHNLQIKDKGLYQCIIIHKKPTGMIRIHQMNSELSVL

SEQ ID NO: 577 - protein, 579 aa, synthetic construct
  REGION 1..579: note = atezolizumab antibody heavy chain -CD86 IgV-Q25M/F33L/H90I
EVQLVESGGGLVQPGGSLRLSCAASGFTFSDSWIHWVRQAPGKGLEWVAWISPYGGSTYYADSVKGRFTISADTSKNTAYLQMNSLRAEDTAVYYCARRHWPGGFDYWGQGTLVTVSSASTKGPSVFPLAPSSKSTSGGTAALGCLVKDYFPEPVTVSWNSGALTSGVHTFPAVLQSSGLYSLSSVVTVPSSSLGTQTYICNVNHKPSNTKVDKKVEPKSCDKTHTCPPCPAPELLGGPSVFLFPPKPKDTLMISRTPEVTCVVVDVSHEDPEVKFNWYVDGVEVHNAKTKPREEQYASTYRVVSVLTVLHQDWLNGKEYKCKVSNKALPAPIEKTISKAKGQPREPQVYTLPPSREEMTKNQVSLTCLVKGFYPSDIAVEWESNGQPENNYKTTPPVLDSDGSFFLYSKLTVDKSRWQQGNVFSCSVMHEALHNHYTQKSLSLSPGAGGGGSGGGGSGGGGSGGGGSGAPLKIQAYFNETADLPCQFANSQNMSLSELVVLWQDQENLVLNEVYLGKEKFDSVHSKYMGRTSFDSDSWTLRLHNLQIKDKGLYQCIIIHKKPTGMIRIHQMNSELSVL

SEQ ID NO: 578 - protein, 579 aa, synthetic construct
  REGION 1..579: note = atezolizumab antibody heavy chain -CD86 IgV-Q25I/F33M/H90I
EVQLVESGGGLVQPGGSLRLSCAASGFTFSDSWIHWVRQAPGKGLEWVAWISPYGGSTYYADSVKGRFTISADTSKNTAYLQMNSLRAEDTAVYYCARRHWPGGFDYWGQGTLVTVSSASTKGPSVFPLAPSSKSTSGGTAALGCLVKDYFPEPVTVSWNSGALTSGVHTFPAVLQSSGLYSLSSVVTVPSSSLGTQTYICNVNHKPSNTKVDKKVEPKSCDKTHTCPPCPAPELLGGPSVFLFPPKPKDTLMISRTPEVTCVVVDVSHEDPEVKFNWYVDGVEVHNAKTKPREEQYASTYRVVSVLTVLHQDWLNGKEYKCKVSNKALPAPIEKTISKAKGQPREPQVYTLPPSREEMTKNQVSLTCLVKGFYPSDIAVEWESNGQPENNYKTTPPVLDSDGSFFLYSKLTVDKSRWQQGNVFSCSVMHEALHNHYTQKSLSLSPGAGGGGSGGGGSGGGGSGGGGSGAPLKIQAYFNETADLPCQFANSQNISLSELVVMWQDQENLVLNEVYLGKEKFDSVHSKYMGRTSFDSDSWTLRLHNLQIKDKGLYQCIIIHKKPTGMIRIHQMNSELSVL

SEQ ID NO: 579 - protein, 579 aa, synthetic construct
  REGION 1..579: note = atezolizumab antibody heavy chain -CD86 IgV-Q25I/F33L/I89V/H90I
EVQLVESGGGLVQPGGSLRLSCAASGFTFSDSWIHWVRQAPGKGLEWVAWISPYGGSTYYADSVKGRFTISADTSKNTAYLQMNSLRAEDTAVYYCARRHWPGGFDYWGQGTLVTVSSASTKGPSVFPLAPSSKSTSGGTAALGCLVKDYFPEPVTVSWNSGALTSGVHTFPAVLQSSGLYSLSSVVTVPSSSLGTQTYICNVNHKPSNTKVDKKVEPKSCDKTHTCPPCPAPELLGGPSVFLFPPKPKDTLMISRTPEVTCVVVDVSHEDPEVKFNWYVDGVEVHNAKTKPREEQYASTYRVVSVLTVLHQDWLNGKEYKCKVSNKALPAPIEKTISKAKGQPREPQVYTLPPSREEMTKNQVSLTCLVKGFYPSDIAVEWESNGQPENNYKTTPPVLDSDGSFFLYSKLTVDKSRWQQGNVFSCSVMHEALHNHYTQKSLSLSPGAGGGGSGGGGSGGGGSGGGGSGAPLKIQAYFNETADLPCQFANSQNISLSELVVLWQDQENLVLNEVYLGKEKFDSVHSKYMGRTSFDSDSWTLRLHNLQIKDKGLYQCIVIHKKPTGMIRIHQMNSELSVL

SEQ ID NO: 580 - protein, 579 aa, synthetic construct
  REGION 1..579: note = atezolizumab antibody heavy chain -CD86 IgV-Q25I/F33L/I89F/H90I
EVQLVESGGGLVQPGGSLRLSCAASGFTFSDSWIHWVRQAPGKGLEWVAWISPYGGSTYYADSVKGRFTISADTSKNTAYLQMNSLRAEDTAVYYCARRHWPGGFDYWGQGTLVTVSSASTKGPSVFPLAPSSKSTSGGTAALGCLVKDYFPEPVTVSWNSGALTSGVHTFPAVLQSSGLYSLSSVVTVPSSSLGTQTYICNVNHKPSNTKVDKKVEPKSCDKTHTCPPCPAPELLGGPSVFLFPPKPKDTLMISRTPEVTCVVVDVSHEDPEVKFNWYVDGVEVHNAKTKPREEQYASTYRVVSVLTVLHQDWLNGKEYKCKVSNKALPAPIEKTISKAKGQPREPQVYTLPPSREEMTKNQVSLTCLVKGFYPSDIAVEWESNGQPENNYKTTPPVLDSDGSFFLYSKLTVDKSRWQQGNVFSCSVMHEALHNHYTQKSLSLSPGAGGGGSGGGGSGGGGSGGGGSGAPLKIQAYFNETADLPCQFANSQNISLSELVVLWQDQENLVLNEVYLGKEKFDSVHSKYMGRTSFDSDSWTLRLHNLQIKDKGLYQCIFIHKKPTGMIRIHQMNSELSVL

SEQ ID NO: 581 - protein, 579 aa, synthetic construct
  REGION 1..579: note = atezolizumab antibody heavy chain -CD86 IgV-Q25I/F33L/I89M/H90I
EVQLVESGGGLVQPGGSLRLSCAASGFTFSDSWIHWVRQAPGKGLEWVAWISPYGGSTYYADSVKGRFTISADTSKNTAYLQMNSLRAEDTAVYYCARRHWPGGFDYWGQGTLVTVSSASTKGPSVFPLAPSSKSTSGGTAALGCLVKDYFPEPVTVSWNSGALTSGVHTFPAVLQSSGLYSLSSVVTVPSSSLGTQTYICNVNHKPSNTKVDKKVEPKSCDKTHTCPPCPAPELLGGPSVFLFPPKPKDTLMISRTPEVTCVVVDVSHEDPEVKFNWYVDGVEVHNAKTKPREEQYASTYRVVSVLTVLHQDWLNGKEYKCKVSNKALPAPIEKTISKAKGQPREPQVYTLPPSREEMTKNQVSLTCLVKGFYPSDIAVEWESNGQPENNYKTTPPVLDSDGSFFLYSKLTVDKSRWQQGNVFSCSVMHEALHNHYTQKSLSLSPGAGGGGSGGGGSGGGGSGGGGSGAPLKIQAYFNETADLPCQFANSQNISLSELVVLWQDQENLVLNEVYLGKEKFDSVHSKYMGRTSFDSDSWTLRLHNLQIKDKGLYQCIMIHKKPTGMIRIHQMNSELSVL

SEQ ID NO: 582 - protein, 579 aa, synthetic construct
  REGION 1..579: note = atezolizumab antibody heavy chain -CD86 IgV-Q25I/F33L/H90M
EVQLVESGGGLVQPGGSLRLSCAASGFTFSDSWIHWVRQAPGKGLEWVAWISPYGGSTYYADSVKGRFTISADTSKNTAYLQMNSLRAEDTAVYYCARRHWPGGFDYWGQGTLVTVSSASTKGPSVFPLAPSSKSTSGGTAALGCLVKDYFPEPVTVSWNSGALTSGVHTFPAVLQSSGLYSLSSVVTVPSSSLGTQTYICNVNHKPSNTKVDKKVEPKSCDKTHTCPPCPAPELLGGPSVFLFPPKPKDTLMISRTPEVTCVVVDVSHEDPEVKFNWYVDGVEVHNAKTKPREEQYASTYRVVSVLTVLHQDWLNGKEYKCKVSNKALPAPIEKTISKAKGQPREPQVYTLPPSREEMTKNQVSLTCLVKGFYPSDIAVEWESNGQPENNYKTTPPVLDSDGSFFLYSKLTVDKSRWQQGNVFSCSVMHEALHNHYTQKSLSLSPGAGGGGSGGGGSGGGGSGGGGSGAPLKIQAYFNETADLPCQFANSQNISLSELVVLWQDQENLVLNEVYLGKEKFDSVHSKYMGRTSFDSDSWTLRLHNLQIKDKGLYQCIIMHKKPTGMIRIHQMNSELSVL

SEQ ID NO: 583 - protein, 580 aa, synthetic construct
  REGION 1..580: note = CD86 IgV-Q25I/F33L/H90I-atezolizumab antibody heavy chain
APLKIQAYFNETADLPCQFANSQNISLSELVVLWQDQENLVLNEVYLGKEKFDSVHSKYMGRTSFDSDSWTLRLHNLQIKDKGLYQCIIIHKKPTGMIRIHQMNSELSVLAGGGGSGGGGSGGGGSGGGGSGEVQLVESGGGLVQPGGSLRLSCAASGFTFSDSWIHWVRQAPGKGLEWVAWISPYGGSTYYADSVKGRFTISADTSKNTAYLQMNSLRAEDTAVYYCARRHWPGGFDYWGQGTLVTVSSASTKGPSVFPLAPSSKSTSGGTAALGCLVKDYFPEPVTVSWNSGALTSGVHTFPAVLQSSGLYSLSSVVTVPSSSLGTQTYICNVNHKPSNTKVDKKVEPKSCDKTHTCPPCPAPELLGGPSVFLFPPKPKDTLMISRTPEVTCVVVDVSHEDPEVKFNWYVDGVEVHNAKTKPREEQYASTYRVVSVLTVLHQDWLNGKEYKCKVSNKALPAPIEKTISKAKGQPREPQVYTLPPSREEMTKNQVSLTCLVKGFYPSDIAVEWESNGQPENNYKTTPPVLDSDGSFFLYSKLTVDKSRWQQGNVFSCSVMHEALHNHYTQKSLSLSPGK

SEQ ID NO: 584 - protein, 580 aa, synthetic construct
  REGION 1..580: note = CD86 IgV-Q25V/F33L/H90I-atezolizumab antibody heavy chain
APLKIQAYFNETADLPCQFANSQNVSLSELVVLWQDQENLVLNEVYLGKEKFDSVHSKYMGRTSFDSDSWTLRLHNLQIKDKGLYQCIIIHKKPTGMIRIHQMNSELSVLAGGGGSGGGGSGGGGSGGGGSGEVQLVESGGGLVQPGGSLRLSCAASGFTFSDSWIHWVRQAPGKGLEWVAWISPYGGSTYYADSVKGRFTISADTSKNTAYLQMNSLRAEDTAVYYCARRHWPGGFDYWGQGTLVTVSSASTKGPSVFPLAPSSKSTSGGTAALGCLVKDYFPEPVTVSWNSGALTSGVHTFPAVLQSSGLYSLSSVVTVPSSSLGTQTYICNVNHKPSNTKVDKKVEPKSCDKTHTCPPCPAPELLGGPSVFLFPPKPKDTLMISRTPEVTCVVVDVSHEDPEVKFNWYVDGVEVHNAKTKPREEQYASTYRVVSVLTVLHQDWLNGKEYKCKVSNKALPAPIEKTISKAKGQPREPQVYTLPPSREEMTKNQVSLTCLVKGFYPSDIAVEWESNGQPENNYKTTPPVLDSDGSFFLYSKLTVDKSRWQQGNVFSCSVMHEALHNHYTQKSLSLSPGK

SEQ ID NO: 585 - protein, 580 aa, synthetic construct
  REGION 1..580: note = CD86 IgV-Q25I/F33V/H90I-atezolizumab antibody heavy chain
APLKIQAYFNETADLPCQFANSQNISLSELVVVWQDQENLVLNEVYLGKEKFDSVHSKYMGRTSFDSDSWTLRLHNLQIKDKGLYQCIIIHKKPTGMIRIHQMNSELSVLAGGGGSGGGGSGGGGSGGGGSGEVQLVESGGGLVQPGGSLRLSCAASGFTFSDSWIHWVRQAPGKGLEWVAWISPYGGSTYYADSVKGRFTISADTSKNTAYLQMNSLRAEDTAVYYCARRHWPGGFDYWGQGTLVTVSSASTKGPSVFPLAPSSKSTSGGTAALGCLVKDYFPEPVTVSWNSGALTSGVHTFPAVLQSSGLYSLSSVVTVPSSSLGTQTYICNVNHKPSNTKVDKKVEPKSCDKTHTCPPCPAPELLGGPSVFLFPPKPKDTLMISRTPEVTCVVVDVSHEDPEVKFNWYVDGVEVHNAKTKPREEQYASTYRVVSVLTVLHQDWLNGKEYKCKVSNKALPAPIEKTISKAKGQPREPQVYTLPPSREEMTKNQVSLTCLVKGFYPSDIAVEWESNGQPENNYKTTPPVLDSDGSFFLYSKLTVDKSRWQQGNVFSCSVMHEALHNHYTQKSLSLSPGK

SEQ ID NO: 586 - protein, 580 aa, synthetic construct
  REGION 1..580: note = CD86 IgV-Q25V/F33V/H90I-atezolizumab antibody heavy chain
APLKIQAYFNETADLPCQFANSQNVSLSELVVVWQDQENLVLNEVYLGKEKFDSVHSKYMGRTSFDSDSWTLRLHNLQIKDKGLYQCIIIHKKPTGMIRIHQMNSELSVLAGGGGSGGGGSGGGGSGGGGSGEVQLVESGGGLVQPGGSLRLSCAASGFTFSDSWIHWVRQAPGKGLEWVAWISPYGGSTYYADSVKGRFTISADTSKNTAYLQMNSLRAEDTAVYYCARRHWPGGFDYWGQGTLVTVSSASTKGPSVFPLAPSSKSTSGGTAALGCLVKDYFPEPVTVSWNSGALTSGVHTFPAVLQSSGLYSLSSVVTVPSSSLGTQTYICNVNHKPSNTKVDKKVEPKSCDKTHTCPPCPAPELLGGPSVFLFPPKPKDTLMISRTPEVTCVVVDVSHEDPEVKFNWYVDGVEVHNAKTKPREEQYASTYRVVSVLTVLHQDWLNGKEYKCKVSNKALPAPIEKTISKAKGQPREPQVYTLPPSREEMTKNQVSLTCLVKGFYPSDIAVEWESNGQPENNYKTTPPVLDSDGSFFLYSKLTVDKSRWQQGNVFSCSVMHEALHNHYTQKSLSLSPGK

SEQ ID NO: 587 - protein, 580 aa, synthetic construct
  REGION 1..580: note = CD86 IgV-Q25I/F33L/H90V-atezolizumab antibody heavy chain
APLKIQAYFNETADLPCQFANSQNISLSELVVLWQDQENLVLNEVYLGKEKFDSVHSKYMGRTSFDSDSWTLRLHNLQIKDKGLYQCIIVHKKPTGMIRIHQMNSELSVLAGGGGSGGGGSGGGGSGGGGSGEVQLVESGGGLVQPGGSLRLSCAASGFTFSDSWIHWVRQAPGKGLEWVAWISPYGGSTYYADSVKGRFTISADTSKNTAYLQMNSLRAEDTAVYYCARRHWPGGFDYWGQGTLVTVSSASTKGPSVFPLAPSSKSTSGGTAALGCLVKDYFPEPVTVSWNSGALTSGVHTFPAVLQSSGLYSLSSVVTVPSSSLGTQTYICNVNHKPSNTKVDKKVEPKSCDKTHTCPPCPAPELLGGPSVFLFPPKPKDTLMISRTPEVTCVVVDVSHEDPEVKFNWYVDGVEVHNAKTKPREEQYASTYRVVSVLTVLHQDWLNGKEYKCKVSNKALPAPIEKTISKAKGQPREPQVYTLPPSREEMTKNQVSLTCLVKGFYPSDIAVEWESNGQPENNYKTTPPVLDSDGSFFLYSKLTVDKSRWQQGNVFSCSVMHEALHNHYTQKSLSLSPGK

SEQ ID NO: 588 - protein, 580 aa, synthetic construct
  REGION 1..580: note = CD86 IgV-Q25V/F33L/H90V-atezolizumab antibody heavy chain
APLKIQAYFNETADLPCQFANSQNVSLSELVVLWQDQENLVLNEVYLGKEKFDSVHSKYMGRTSFDSDSWTLRLHNLQIKDKGLYQCIIVHKKPTGMIRIHQMNSELSVLAGGGGSGGGGSGGGGSGGGGSGEVQLVESGGGLVQPGGSLRLSCAASGFTFSDSWIHWVRQAPGKGLEWVAWISPYGGSTYYADSVKGRFTISADTSKNTAYLQMNSLRAEDTAVYYCARRHWPGGFDYWGQGTLVTVSSASTKGPSVFPLAPSSKSTSGGTAALGCLVKDYFPEPVTVSWNSGALTSGVHTFPAVLQSSGLYSLSSVVTVPSSSLGTQTYICNVNHKPSNTKVDKKVEPKSCDKTHTCPPCPAPELLGGPSVFLFPPKPKDTLMISRTPEVTCVVVDVSHEDPEVKFNWYVDGVEVHNAKTKPREEQYASTYRVVSVLTVLHQDWLNGKEYKCKVSNKALPAPIEKTISKAKGQPREPQVYTLPPSREEMTKNQVSLTCLVKGFYPSDIAVEWESNGQPENNYKTTPPVLDSDGSFFLYSKLTVDKSRWQQGNVFSCSVMHEALHNHYTQKSLSLSPGK

SEQ ID NO: 589 - protein, 580 aa, synthetic construct
  REGION 1..580: note = CD86 IgV-Q25I/F33V/H90V-atezolizumab antibody heavy chain
APLKIQAYFNETADLPCQFANSQNISLSELVVVWQDQENLVLNEVYLGKEKFDSVHSKYMGRTSFDSDSWTLRLHNLQIKDKGLYQCIIVHKKPTGMIRIHQMNSELSVLAGGGGSGGGGSGGGGSGGGGSGEVQLVESGGGLVQPGGSLRLSCAASGFTFSDSWIHWVRQAPGKGLEWVAWISPYGGSTYYADSVKGRFTISADTSKNTAYLQMNSLRAEDTAVYYCARRHWPGGFDYWGQGTLVTVSSASTKGPSVFPLAPSSKSTSGGTAALGCLVKDYFPEPVTVSWNSGALTSGVHTFPAVLQSSGLYSLSSVVTVPSSSLGTQTYICNVNHKPSNTKVDKKVEPKSCDKTHTCPPCPAPELLGGPSVFLFPPKPKDTLMISRTPEVTCVVVDVSHEDPEVKFNWYVDGVEVHNAKTKPREEQYASTYRVVSVLTVLHQDWLNGKEYKCKVSNKALPAPIEKTISKAKGQPREPQVYTLPPSREEMTKNQVSLTCLVKGFYPSDIAVEWESNGQPENNYKTTPPVLDSDGSFFLYSKLTVDKSRWQQGNVFSCSVMHEALHNHYTQKSLSLSPGK

SEQ ID NO: 590 - protein, 580 aa, synthetic construct
  REGION 1..580: note = CD86 IgV-Q25V/F33V/H90V-atezolizumab antibody heavy chain
APLKIQAYFNETADLPCQFANSQNVSLSELVVVWQDQENLVLNEVYLGKEKFDSVHSKYMGRTSFDSDSWTLRLHNLQIKDKGLYQCIIVHKKPTGMIRIHQMNSELSVLAGGGGSGGGGSGGGGSGGGGSGEVQLVESGGGLVQPGGSLRLSCAASGFTFSDSWIHWVRQAPGKGLEWVAWISPYGGSTYYADSVKGRFTISADTSKNTAYLQMNSLRAEDTAVYYCARRHWPGGFDYWGQGTLVTVSSASTKGPSVFPLAPSSKSTSGGTAALGCLVKDYFPEPVTVSWNSGALTSGVHTFPAVLQSSGLYSLSSVVTVPSSSLGTQTYICNVNHKPSNTKVDKKVEPKSCDKTHTCPPCPAPELLGGPSVFLFPPKPKDTLMISRTPEVTCVVVDVSHEDPEVKFNWYVDGVEVHNAKTKPREEQYASTYRVVSVLTVLHQDWLNGKEYKCKVSNKALPAPIEKTISKAKGQPREPQVYTLPPSREEMTKNQVSLTCLVKGFYPSDIAVEWESNGQPENNYKTTPPVLDSDGSFFLYSKLTVDKSRWQQGNVFSCSVMHEALHNHYTQKSLSLSPGK

SEQ ID NO: 591 - protein, 580 aa, synthetic construct
  REGION 1..580: note = CD86 IgV-A13L/Q25I/F33L/H90I-atezolizumab antibody heavy chain
APLKIQAYFNETLDLPCQFANSQNISLSELVVLWQDQENLVLNEVYLGKEKFDSVHSKYMGRTSFDSDSWTLRLHNLQIKDKGLYQCIIIHKKPTGMIRIHQMNSELSVLAGGGGSGGGGSGGGGSGGGGSGEVQLVESGGGLVQPGGSLRLSCAASGFTFSDSWIHWVRQAPGKGLEWVAWISPYGGSTYYADSVKGRFTISADTSKNTAYLQMNSLRAEDTAVYYCARRHWPGGFDYWGQGTLVTVSSASTKGPSVFPLAPSSKSTSGGTAALGCLVKDYFPEPVTVSWNSGALTSGVHTFPAVLQSSGLYSLSSVVTVPSSSLGTQTYICNVNHKPSNTKVDKKVEPKSCDKTHTCPPCPAPELLGGPSVFLFPPKPKDTLMISRTPEVTCVVVDVSHEDPEVKFNWYVDGVEVHNAKTKPREEQYASTYRVVSVLTVLHQDWLNGKEYKCKVSNKALPAPIEKTISKAKGQPREPQVYTLPPSREEMTKNQVSLTCLVKGFYPSDIAVEWESNGQPENNYKTTPPVLDSDGSFFLYSKLTVDKSRWQQGNVFSCSVMHEALHNHYTQKSLSLSPGK

SEQ ID NO: 592 - protein, 580 aa, synthetic construct
  REGION 1..580: note = CD86 IgV-A13I/Q25I/F33L/H90I-atezolizumab antibody heavy chain
APLKIQAYFNETIDLPCQFANSQNISLSELVVLWQDQENLVLNEVYLGKEKFDSVHSKYMGRTSFDSDSWTLRLHNLQIKDKGLYQCIIIHKKPTGMIRIHQMNSELSVLAGGGGSGGGGSGGGGSGGGGSGEVQLVESGGGLVQPGGSLRLSCAASGFTFSDSWIHWVRQAPGKGLEWVAWISPYGGSTYYADSVKGRFTISADTSKNTAYLQMNSLRAEDTAVYYCARRHWPGGFDYWGQGTLVTVSSASTKGPSVFPLAPSSKSTSGGTAALGCLVKDYFPEPVTVSWNSGALTSGVHTFPAVLQSSGLYSLSSVVTVPSSSLGTQTYICNVNHKPSNTKVDKKVEPKSCDKTHTCPPCPAPELLGGPSVFLFPPKPKDTLMISRTPEVTCVVVDVSHEDPEVKFNWYVDGVEVHNAKTKPREEQYASTYRVVSVLTVLHQDWLNGKEYKCKVSNKALPAPIEKTISKAKGQPREPQVYTLPPSREEMTKNQVSLTCLVKGFYPSDIAVEWESNGQPENNYKTTPPVLDSDGSFFLYSKLTVDKSRWQQGNVFSCSVMHEALHNHYTQKSLSLSPGK

SEQ ID NO: 593 - protein, 580 aa, synthetic construct
  REGION 1..580: note = CD86 IgV-A13L/Q25V/F33L/H90I-atezolizumab antibody heavy chain
APLKIQAYFNETLDLPCQFANSQNVSLSELVVLWQDQENLVLNEVYLGKEKFDSVHSKYMGRTSFDSDSWTLRLHNLQIKDKGLYQCIIIHKKPTGMIRIHQMNSELSVLAGGGGSGGGGSGGGGSGGGGSGEVQLVESGGGLVQPGGSLRLSCAASGFTFSDSWIHWVRQAPGKGLEWVAWISPYGGSTYYADSVKGRFTISADTSKNTAYLQMNSLRAEDTAVYYCARRHWPGGFDYWGQGTLVTVSSASTKGPSVFPLAPSSKSTSGGTAALGCLVKDYFPEPVTVSWNSGALTSGVHTFPAVLQSSGLYSLSSVVTVPSSSLGTQTYICNVNHKPSNTKVDKKVEPKSCDKTHTCPPCPAPELLGGPSVFLFPPKPKDTLMISRTPEVTCVVVDVSHEDPEVKFNWYVDGVEVHNAKTKPREEQYASTYRVVSVLTVLHQDWLNGKEYKCKVSNKALPAPIEKTISKAKGQPREPQVYTLPPSREEMTKNQVSLTCLVKGFYPSDIAVEWESNGQPENNYKTTPPVLDSDGSFFLYSKLTVDKSRWQQGNVFSCSVMHEALHNHYTQKSLSLSPGK

SEQ ID NO: 594 - protein, 580 aa, synthetic construct
  REGION 1..580: note = CD86 IgV-A13I/Q25V/F33L/H90I-atezolizumab antibody heavy chain
APLKIQAYFNETIDLPCQFANSQNVSLSELVVLWQDQENLVLNEVYLGKEKFDSVHSKYMGRTSFDSDSWTLRLHNLQIKDKGLYQCIIIHKKPTGMIRIHQMNSELSVLAGGGGSGGGGSGGGGSGGGGSGEVQLVESGGGLVQPGGSLRLSCAASGFTFSDSWIHWVRQAPGKGLEWVAWISPYGGSTYYADSVKGRFTISADTSKNTAYLQMNSLRAEDTAVYYCARRHWPGGFDYWGQGTLVTVSSASTKGPSVFPLAPSSKSTSGGTAALGCLVKDYFPEPVTVSWNSGALTSGVHTFPAVLQSSGLYSLSSVVTVPSSSLGTQTYICNVNHKPSNTKVDKKVEPKSCDKTHTCPPCPAPELLGGPSVFLFPPKPKDTLMISRTPEVTCVVVDVSHEDPEVKFNWYVDGVEVHNAKTKPREEQYASTYRVVSVLTVLHQDWLNGKEYKCKVSNKALPAPIEKTISKAKGQPREPQVYTLPPSREEMTKNQVSLTCLVKGFYPSDIAVEWESNGQPENNYKTTPPVLDSDGSFFLYSKLTVDKSRWQQGNVFSCSVMHEALHNHYTQKSLSLSPGK

SEQ ID NO: 595 - protein, 580 aa, synthetic construct
  REGION 1..580: note = CD86 IgV-Q25I/F33L/I89L/H90I-atezolizumab antibody heavy chain
APLKIQAYFNETADLPCQFANSQNISLSELVVLWQDQENLVLNEVYLGKEKFDSVHSKYMGRTSFDSDSWTLRLHNLQIKDKGLYQCILIHKKPTGMIRIHQMNSELSVLAGGGGSGGGGSGGGGSGGGGSGEVQLVESGGGLVQPGGSLRLSCAASGFTFSDSWIHWVRQAPGKGLEWVAWISPYGGSTYYADSVKGRFTISADTSKNTAYLQMNSLRAEDTAVYYCARRHWPGGFDYWGQGTLVTVSSASTKGPSVFPLAPSSKSTSGGTAALGCLVKDYFPEPVTVSWNSGALTSGVHTFPAVLQSSGLYSLSSVVTVPSSSLGTQTYICNVNHKPSNTKVDKKVEPKSCDKTHTCPPCPAPELLGGPSVFLFPPKPKDTLMISRTPEVTCVVVDVSHEDPEVKFNWYVDGVEVHNAKTKPREEQYASTYRVVSVLTVLHQDWLNGKEYKCKVSNKALPAPIEKTISKAKGQPREPQVYTLPPSREEMTKNQVSLTCLVKGFYPSDIAVEWESNGQPENNYKTTPPVLDSDGSFFLYSKLTVDKSRWQQGNVFSCSVMHEALHNHYTQKSLSLSPGK

SEQ ID NO: 596 - protein, 580 aa, synthetic construct
  REGION 1..580: note = CD86 IgV-Q25I/F33L/M60R/H90I-atezolizumab antibody heavy chain
APLKIQAYFNETADLPCQFANSQNISLSELVVLWQDQENLVLNEVYLGKEKFDSVHSKYRGRTSFDSDSWTLRLHNLQIKDKGLYQCIIIHKKPTGMIRIHQMNSELSVLAGGGGSGGGGSGGGGSGGGGSGEVQLVESGGGLVQPGGSLRLSCAASGFTFSDSWIHWVRQAPGKGLEWVAWISPYGGSTYYADSVKGRFTISADTSKNTAYLQMNSLRAEDTAVYYCARRHWPGGFDYWGQGTLVTVSSASTKGPSVFPLAPSSKSTSGGTAALGCLVKDYFPEPVTVSWNSGALTSGVHTFPAVLQSSGLYSLSSVVTVPSSSLGTQTYICNVNHKPSNTKVDKKVEPKSCDKTHTCPPCPAPELLGGPSVFLFPPKPKDTLMISRTPEVTCVVVDVSHEDPEVKFNWYVDGVEVHNAKTKPREEQYASTYRVVSVLTVLHQDWLNGKEYKCKVSNKALPAPIEKTISKAKGQPREPQVYTLPPSREEMTKNQVSLTCLVKGFYPSDIAVEWESNGQPENNYKTTPPVLDSDGSFFLYSKLTVDKSRWQQGNVFSCSVMHEALHNHYTQKSLSLSPGK

SEQ ID NO: 597 - protein, 580 aa, synthetic construct
  REGION 1..580: note = CD86 IgV-Q25V/F33L/I89L/H90I-atezolizumab antibody heavy chain
APLKIQAYFNETADLPCQFANSQNVSLSELVVLWQDQENLVLNEVYLGKEKFDSVHSKYMGRTSFDSDSWTLRLHNLQIKDKGLYQCILIHKKPTGMIRIHQMNSELSVLAGGGGSGGGGSGGGGSGGGGSGEVQLVESGGGLVQPGGSLRLSCAASGFTFSDSWIHWVRQAPGKGLEWVAWISPYGGSTYYADSVKGRFTISADTSKNTAYLQMNSLRAEDTAVYYCARRHWPGGFDYWGQGTLVTVSSASTKGPSVFPLAPSSKSTSGGTAALGCLVKDYFPEPVTVSWNSGALTSGVHTFPAVLQSSGLYSLSSVVTVPSSSLGTQTYICNVNHKPSNTKVDKKVEPKSCDKTHTCPPCPAPELLGGPSVFLFPPKPKDTLMISRTPEVTCVVVDVSHEDPEVKFNWYVDGVEVHNAKTKPREEQYASTYRVVSVLTVLHQDWLNGKEYKCKVSNKALPAPIEKTISKAKGQPREPQVYTLPPSREEMTKNQVSLTCLVKGFYPSDIAVEWESNGQPENNYKTTPPVLDSDGSFFLYSKLTVDKSRWQQGNVFSCSVMHEALHNHYTQKSLSLSPGK

SEQ ID NO: 598 - protein, 580 aa, synthetic construct
  REGION 1..580: note = CD86 IgV-Q25V/F33L/M60R/H90I-atezolizumab antibody heavy chain
APLKIQAYFNETADLPCQFANSQNVSLSELVVLWQDQENLVLNEVYLGKEKFDSVHSKYRGRTSFDSDSWTLRLHNLQIKDKGLYQCIIIHKKPTGMIRIHQMNSELSVLAGGGGSGGGGSGGGGSGGGGSGEVQLVESGGGLVQPGGSLRLSCAASGFTFSDSWIHWVRQAPGKGLEWVAWISPYGGSTYYADSVKGRFTISADTSKNTAYLQMNSLRAEDTAVYYCARRHWPGGFDYWGQGTLVTVSSASTKGPSVFPLAPSSKSTSGGTAALGCLVKDYFPEPVTVSWNSGALTSGVHTFPAVLQSSGLYSLSSVVTVPSSSLGTQTYICNVNHKPSNTKVDKKVEPKSCDKTHTCPPCPAPELLGGPSVFLFPPKPKDTLMISRTPEVTCVVVDVSHEDPEVKFNWYVDGVEVHNAKTKPREEQYASTYRVVSVLTVLHQDWLNGKEYKCKVSNKALPAPIEKTISKAKGQPREPQVYTLPPSREEMTKNQVSLTCLVKGFYPSDIAVEWESNGQPENNYKTTPPVLDSDGSFFLYSKLTVDKSRWQQGNVFSCSVMHEALHNHYTQKSLSLSPGK

SEQ ID NO: 599 - protein, 580 aa, synthetic construct
  REGION 1..580: note = CD86 IgV-Q25F/F33L/H90I-atezolizumab antibody heavy chain
APLKIQAYFNETADLPCQFANSQNFSLSELVVLWQDQENLVLNEVYLGKEKFDSVHSKYMGRTSFDSDSWTLRLHNLQIKDKGLYQCIIIHKKPTGMIRIHQMNSELSVLAGGGGSGGGGSGGGGSGGGGSGEVQLVESGGGLVQPGGSLRLSCAASGFTFSDSWIHWVRQAPGKGLEWVAWISPYGGSTYYADSVKGRFTISADTSKNTAYLQMNSLRAEDTAVYYCARRHWPGGFDYWGQGTLVTVSSASTKGPSVFPLAPSSKSTSGGTAALGCLVKDYFPEPVTVSWNSGALTSGVHTFPAVLQSSGLYSLSSVVTVPSSSLGTQTYICNVNHKPSNTKVDKKVEPKSCDKTHTCPPCPAPELLGGPSVFLFPPKPKDTLMISRTPEVTCVVVDVSHEDPEVKFNWYVDGVEVHNAKTKPREEQYASTYRVVSVLTVLHQDWLNGKEYKCKVSNKALPAPIEKTISKAKGQPREPQVYTLPPSREEMTKNQVSLTCLVKGFYPSDIAVEWESNGQPENNYKTTPPVLDSDGSFFLYSKLTVDKSRWQQGNVFSCSVMHEALHNHYTQKSLSLSPGK

SEQ ID NO: 600 - protein, 580 aa, synthetic construct
  REGION 1..580: note = CD86 IgV-Q25I/F33L/H90F-atezolizumab antibody heavy chain
APLKIQAYFNETADLPCQFANSQNISLSELVVLWQDQENLVLNEVYLGKEKFDSVHSKYMGRTSFDSDSWTLRLHNLQIKDKGLYQCIIFHKKPTGMIRIHQMNSELSVLAGGGGSGGGGSGGGGSGGGGSGEVQLVESGGGLVQPGGSLRLSCAASGFTFSDSWIHWVRQAPGKGLEWVAWISPYGGSTYYADSVKGRFTISADTSKNTAYLQMNSLRAEDTAVYYCARRHWPGGFDYWGQGTLVTVSSASTKGPSVFPLAPSSKSTSGGTAALGCLVKDYFPEPVTVSWNSGALTSGVHTFPAVLQSSGLYSLSSVVTVPSSSLGTQTYICNVNHKPSNTKVDKKVEPKSCDKTHTCPPCPAPELLGGPSVFLFPPKPKDTLMISRTPEVTCVVVDVSHEDPEVKFNWYVDGVEVHNAKTKPREEQYASTYRVVSVLTVLHQDWLNGKEYKCKVSNKALPAPIEKTISKAKGQPREPQVYTLPPSREEMTKNQVSLTCLVKGFYPSDIAVEWESNGQPENNYKTTPPVLDSDGSFFLYSKLTVDKSRWQQGNVFSCSVMHEALHNHYTQKSLSLSPGK

SEQ ID NO: 601 - protein, 580 aa, synthetic construct
  REGION 1..580: note = CD86 IgV-Q25I/F33A/H90I-atezolizumab antibody heavy chain
APLKIQAYFNETADLPCQFANSQNISLSELVVAWQDQENLVLNEVYLGKEKFDSVHSKYMGRTSFDSDSWTLRLHNLQIKDKGLYQCIIIHKKPTGMIRIHQMNSELSVLAGGGGSGGGGSGGGGSGGGGSGEVQLVESGGGLVQPGGSLRLSCAASGFTFSDSWIHWVRQAPGKGLEWVAWISPYGGSTYYADSVKGRFTISADTSKNTAYLQMNSLRAEDTAVYYCARRHWPGGFDYWGQGTLVTVSSASTKGPSVFPLAPSSKSTSGGTAALGCLVKDYFPEPVTVSWNSGALTSGVHTFPAVLQSSGLYSLSSVVTVPSSSLGTQTYICNVNHKPSNTKVDKKVEPKSCDKTHTCPPCPAPELLGGPSVFLFPPKPKDTLMISRTPEVTCVVVDVSHEDPEVKFNWYVDGVEVHNAKTKPREEQYASTYRVVSVLTVLHQDWLNGKEYKCKVSNKALPAPIEKTISKAKGQPREPQVYTLPPSREEMTKNQVSLTCLVKGFYPSDIAVEWESNGQPENNYKTTPPVLDSDGSFFLYSKLTVDKSRWQQGNVFSCSVMHEALHNHYTQKSLSLSPGK

SEQ ID NO: 602 - protein, 580 aa, synthetic construct
  REGION 1..580: note = CD86 IgV-Q25I/H90I-atezolizumab antibody heavy chain
APLKIQAYFNETADLPCQFANSQNISLSELVVFWQDQENLVLNEVYLGKEKFDSVHSKYMGRTSFDSDSWTLRLHNLQIKDKGLYQCIIIHKKPTGMIRIHQMNSELSVLAGGGGSGGGGSGGGGSGGGGSGEVQLVESGGGLVQPGGSLRLSCAASGFTFSDSWIHWVRQAPGKGLEWVAWISPYGGSTYYADSVKGRFTISADTSKNTAYLQMNSLRAEDTAVYYCARRHWPGGFDYWGQGTLVTVSSASTKGPSVFPLAPSSKSTSGGTAALGCLVKDYFPEPVTVSWNSGALTSGVHTFPAVLQSSGLYSLSSVVTVPSSSLGTQTYICNVNHKPSNTKVDKKVEPKSCDKTHTCPPCPAPELLGGPSVFLFPPKPKDTLMISRTPEVTCVVVDVSHEDPEVKFNWYVDGVEVHNAKTKPREEQYASTYRVVSVLTVLHQDWLNGKEYKCKVSNKALPAPIEKTISKAKGQPREPQVYTLPPSREEMTKNQVSLTCLVKGFYPSDIAVEWESNGQPENNYKTTPPVLDSDGSFFLYSKLTVDKSRWQQGNVFSCSVMHEALHNHYTQKSLSLSPGK

SEQ ID NO: 603 - protein, 580 aa, synthetic construct
  REGION 1..580: note = CD86 IgV-Q25V/H90V-atezolizumab antibody heavy chain
APLKIQAYFNETADLPCQFANSQNVSLSELVVFWQDQENLVLNEVYLGKEKFDSVHSKYMGRTSFDSDSWTLRLHNLQIKDKGLYQCIIVHKKPTGMIRIHQMNSELSVLAGGGGSGGGGSGGGGSGGGGSGEVQLVESGGGLVQPGGSLRLSCAASGFTFSDSWIHWVRQAPGKGLEWVAWISPYGGSTYYADSVKGRFTISADTSKNTAYLQMNSLRAEDTAVYYCARRHWPGGFDYWGQGTLVTVSSASTKGPSVFPLAPSSKSTSGGTAALGCLVKDYFPEPVTVSWNSGALTSGVHTFPAVLQSSGLYSLSSVVTVPSSSLGTQTYICNVNHKPSNTKVDKKVEPKSCDKTHTCPPCPAPELLGGPSVFLFPPKPKDTLMISRTPEVTCVVVDVSHEDPEVKFNWYVDGVEVHNAKTKPREEQYASTYRVVSVLTVLHQDWLNGKEYKCKVSNKALPAPIEKTISKAKGQPREPQVYTLPPSREEMTKNQVSLTCLVKGFYPSDIAVEWESNGQPENNYKTTPPVLDSDGSFFLYSKLTVDKSRWQQGNVFSCSVMHEALHNHYTQKSLSLSPGK

SEQ ID NO: 604 - protein, 580 aa, synthetic construct
  REGION 1..580: note = CD86 IgV-Q25V/H90I-atezolizumab antibody heavy chain
APLKIQAYFNETADLPCQFANSQNVSLSELVVFWQDQENLVLNEVYLGKEKFDSVHSKYMGRTSFDSDSWTLRLHNLQIKDKGLYQCIIIHKKPTGMIRIHQMNSELSVLAGGGGSGGGGSGGGGSGGGGSGEVQLVESGGGLVQPGGSLRLSCAASGFTFSDSWIHWVRQAPGKGLEWVAWISPYGGSTYYADSVKGRFTISADTSKNTAYLQMNSLRAEDTAVYYCARRHWPGGFDYWGQGTLVTVSSASTKGPSVFPLAPSSKSTSGGTAALGCLVKDYFPEPVTVSWNSGALTSGVHTFPAVLQSSGLYSLSSVVTVPSSSLGTQTYICNVNHKPSNTKVDKKVEPKSCDKTHTCPPCPAPELLGGPSVFLFPPKPKDTLMISRTPEVTCVVVDVSHEDPEVKFNWYVDGVEVHNAKTKPREEQYASTYRVVSVLTVLHQDWLNGKEYKCKVSNKALPAPIEKTISKAKGQPREPQVYTLPPSREEMTKNQVSLTCLVKGFYPSDIAVEWESNGQPENNYKTTPPVLDSDGSFFLYSKLTVDKSRWQQGNVFSCSVMHEALHNHYTQKSLSLSPGK

SEQ ID NO: 605 - protein, 580 aa, synthetic construct
  REGION 1..580: note = CD86 IgV-Q25F/H90I-atezolizumab antibody heavy chain
APLKIQAYFNETADLPCQFANSQNFSLSELVVFWQDQENLVLNEVYLGKEKFDSVHSKYMGRTSFDSDSWTLRLHNLQIKDKGLYQCIIIHKKPTGMIRIHQMNSELSVLAGGGGSGGGGSGGGGSGGGGSGEVQLVESGGGLVQPGGSLRLSCAASGFTFSDSWIHWVRQAPGKGLEWVAWISPYGGSTYYADSVKGRFTISADTSKNTAYLQMNSLRAEDTAVYYCARRHWPGGFDYWGQGTLVTVSSASTKGPSVFPLAPSSKSTSGGTAALGCLVKDYFPEPVTVSWNSGALTSGVHTFPAVLQSSGLYSLSSVVTVPSSSLGTQTYICNVNHKPSNTKVDKKVEPKSCDKTHTCPPCPAPELLGGPSVFLFPPKPKDTLMISRTPEVTCVVVDVSHEDPEVKFNWYVDGVEVHNAKTKPREEQYASTYRVVSVLTVLHQDWLNGKEYKCKVSNKALPAPIEKTISKAKGQPREPQVYTLPPSREEMTKNQVSLTCLVKGFYPSDIAVEWESNGQPENNYKTTPPVLDSDGSFFLYSKLTVDKSRWQQGNVFSCSVMHEALHNHYTQKSLSLSPGK

SEQ ID NO: 606 - protein, 580 aa, synthetic construct
  REGION 1..580: note = CD86 IgV-Q25F/H90V-atezolizumab antibody heavy chain
APLKIQAYFNETADLPCQFANSQNFSLSELVVFWQDQENLVLNEVYLGKEKFDSVHSKYMGRTSFDSDSWTLRLHNLQIKDKGLYQCIIVHKKPTGMIRIHQMNSELSVLAGGGGSGGGGSGGGGSGGGGSGEVQLVESGGGLVQPGGSLRLSCAASGFTFSDSWIHWVRQAPGKGLEWVAWISPYGGSTYYADSVKGRFTISADTSKNTAYLQMNSLRAEDTAVYYCARRHWPGGFDYWGQGTLVTVSSASTKGPSVFPLAPSSKSTSGGTAALGCLVKDYFPEPVTVSWNSGALTSGVHTFPAVLQSSGLYSLSSVVTVPSSSLGTQTYICNVNHKPSNTKVDKKVEPKSCDKTHTCPPCPAPELLGGPSVFLFPPKPKDTLMISRTPEVTCVVVDVSHEDPEVKFNWYVDGVEVHNAKTKPREEQYASTYRVVSVLTVLHQDWLNGKEYKCKVSNKALPAPIEKTISKAKGQPREPQVYTLPPSREEMTKNQVSLTCLVKGFYPSDIAVEWESNGQPENNYKTTPPVLDSDGSFFLYSKLTVDKSRWQQGNVFSCSVMHEALHNHYTQKSLSLSPGK

SEQ ID NO: 607 - protein, 580 aa, synthetic construct
  REGION 1..580: note = CD86 IgV-A13F/Q25I/F33L/H90I-atezolizumab antibody heavy chain
APLKIQAYFNETFDLPCQFANSQNISLSELVVLWQDQENLVLNEVYLGKEKFDSVHSKYMGRTSFDSDSWTLRLHNLQIKDKGLYQCIIIHKKPTGMIRIHQMNSELSVLAGGGGSGGGGSGGGGSGGGGSGEVQLVESGGGLVQPGGSLRLSCAASGFTFSDSWIHWVRQAPGKGLEWVAWISPYGGSTYYADSVKGRFTISADTSKNTAYLQMNSLRAEDTAVYYCARRHWPGGFDYWGQGTLVTVSSASTKGPSVFPLAPSSKSTSGGTAALGCLVKDYFPEPVTVSWNSGALTSGVHTFPAVLQSSGLYSLSSVVTVPSSSLGTQTYICNVNHKPSNTKVDKKVEPKSCDKTHTCPPCPAPELLGGPSVFLFPPKPKDTLMISRTPEVTCVVVDVSHEDPEVKFNWYVDGVEVHNAKTKPREEQYASTYRVVSVLTVLHQDWLNGKEYKCKVSNKALPAPIEKTISKAKGQPREPQVYTLPPSREEMTKNQVSLTCLVKGFYPSDIAVEWESNGQPENNYKTTPPVLDSDGSFFLYSKLTVDKSRWQQGNVFSCSVMHEALHNHYTQKSLSLSPGK

SEQ ID NO: 608 - protein, 580 aa, synthetic construct
  REGION 1..580: note = CD86 IgV-A13M/Q25I/F33L/H90I-atezolizumab antibody heavy chain
APLKIQAYFNETMDLPCQFANSQNISLSELVVLWQDQENLVLNEVYLGKEKFDSVHSKYMGRTSFDSDSWTLRLHNLQIKDKGLYQCIIIHKKPTGMIRIHQMNSELSVLAGGGGSGGGGSGGGGSGGGGSGEVQLVESGGGLVQPGGSLRLSCAASGFTFSDSWIHWVRQAPGKGLEWVAWISPYGGSTYYADSVKGRFTISADTSKNTAYLQMNSLRAEDTAVYYCARRHWPGGFDYWGQGTLVTVSSASTKGPSVFPLAPSSKSTSGGTAALGCLVKDYFPEPVTVSWNSGALTSGVHTFPAVLQSSGLYSLSSVVTVPSSSLGTQTYICNVNHKPSNTKVDKKVEPKSCDKTHTCPPCPAPELLGGPSVFLFPPKPKDTLMISRTPEVTCVVVDVSHEDPEVKFNWYVDGVEVHNAKTKPREEQYASTYRVVSVLTVLHQDWLNGKEYKCKVSNKALPAPIEKTISKAKGQPREPQVYTLPPSREEMTKNQVSLTCLVKGFYPSDIAVEWESNGQPENNYKTTPPVLDSDGSFFLYSKLTVDKSRWQQGNVFSCSVMHEALHNHYTQKSLSLSPGK

SEQ ID NO: 609 - protein, 580 aa, synthetic construct
  REGION 1..580: note = CD86 IgV-Q25A/F33L/H90I-atezolizumab antibody heavy chain
APLKIQAYFNETADLPCQFANSQNASLSELVVLWQDQENLVLNEVYLGKEKFDSVHSKYMGRTSFDSDSWTLRLHNLQIKDKGLYQCIIIHKKPTGMIRIHQMNSELSVLAGGGGSGGGGSGGGGSGGGGSGEVQLVESGGGLVQPGGSLRLSCAASGFTFSDSWIHWVRQAPGKGLEWVAWISPYGGSTYYADSVKGRFTISADTSKNTAYLQMNSLRAEDTAVYYCARRHWPGGFDYWGQGTLVTVSSASTKGPSVFPLAPSSKSTSGGTAALGCLVKDYFPEPVTVSWNSGALTSGVHTFPAVLQSSGLYSLSSVVTVPSSSLGTQTYICNVNHKPSNTKVDKKVEPKSCDKTHTCPPCPAPELLGGPSVFLFPPKPKDTLMISRTPEVTCVVVDVSHEDPEVKFNWYVDGVEVHNAKTKPREEQYASTYRVVSVLTVLHQDWLNGKEYKCKVSNKALPAPIEKTISKAKGQPREPQVYTLPPSREEMTKNQVSLTCLVKGFYPSDIAVEWESNGQPENNYKTTPPVLDSDGSFFLYSKLTVDKSRWQQGNVFSCSVMHEALHNHYTQKSLSLSPGK

SEQ ID NO: 610 - protein, 580 aa, synthetic construct
  REGION 1..580: note = CD86 IgV-Q25M/F33L/H90I-atezolizumab antibody heavy chain
APLKIQAYFNETADLPCQFANSQNMSLSELVVLWQDQENLVLNEVYLGKEKFDSVHSKYMGRTSFDSDSWTLRLHNLQIKDKGLYQCIIIHKKPTGMIRIHQMNSELSVLAGGGGSGGGGSGGGGSGGGGSGEVQLVESGGGLVQPGGSLRLSCAASGFTFSDSWIHWVRQAPGKGLEWVAWISPYGGSTYYADSVKGRFTISADTSKNTAYLQMNSLRAEDTAVYYCARRHWPGGFDYWGQGTLVTVSSASTKGPSVFPLAPSSKSTSGGTAALGCLVKDYFPEPVTVSWNSGALTSGVHTFPAVLQSSGLYSLSSVVTVPSSSLGTQTYICNVNHKPSNTKVDKKVEPKSCDKTHTCPPCPAPELLGGPSVFLFPPKPKDTLMISRTPEVTCVVVDVSHEDPEVKFNWYVDGVEVHNAKTKPREEQYASTYRVVSVLTVLHQDWLNGKEYKCKVSNKALPAPIEKTISKAKGQPREPQVYTLPPSREEMTKNQVSLTCLVKGFYPSDIAVEWESNGQPENNYKTTPPVLDSDGSFFLYSKLTVDKSRWQQGNVFSCSVMHEALHNHYTQKSLSLSPGK

SEQ ID NO: 611 - protein, 580 aa, synthetic construct
  REGION 1..580: note = CD86 IgV-Q25I/F33M/H90I-atezolizumab antibody heavy chain
APLKIQAYFNETADLPCQFANSQNISLSELVVMWQDQENLVLNEVYLGKEKFDSVHSKYMGRTSFDSDSWTLRLHNLQIKDKGLYQCIIIHKKPTGMIRIHQMNSELSVLAGGGGSGGGGSGGGGSGGGGSGEVQLVESGGGLVQPGGSLRLSCAASGFTFSDSWIHWVRQAPGKGLEWVAWISPYGGSTYYADSVKGRFTISADTSKNTAYLQMNSLRAEDTAVYYCARRHWPGGFDYWGQGTLVTVSSASTKGPSVFPLAPSSKSTSGGTAALGCLVKDYFPEPVTVSWNSGALTSGVHTFPAVLQSSGLYSLSSVVTVPSSSLGTQTYICNVNHKPSNTKVDKKVEPKSCDKTHTCPPCPAPELLGGPSVFLFPPKPKDTLMISRTPEVTCVVVDVSHEDPEVKFNWYVDGVEVHNAKTKPREEQYASTYRVVSVLTVLHQDWLNGKEYKCKVSNKALPAPIEKTISKAKGQPREPQVYTLPPSREEMTKNQVSLTCLVKGFYPSDIAVEWESNGQPENNYKTTPPVLDSDGSFFLYSKLTVDKSRWQQGNVFSCSVMHEALHNHYTQKSLSLSPGK

SEQ ID NO: 612 - protein, 580 aa, synthetic construct
  REGION 1..580: note = CD86 IgV-Q25I/F33L/I89V/H90I-atezolizumab antibody heavy chain
APLKIQAYFNETADLPCQFANSQNISLSELVVLWQDQENLVLNEVYLGKEKFDSVHSKYMGRTSFDSDSWTLRLHNLQIKDKGLYQCIVIHKKPTGMIRIHQMNSELSVLAGGGGSGGGGSGGGGSGGGGSGEVQLVESGGGLVQPGGSLRLSCAASGFTFSDSWIHWVRQAPGKGLEWVAWISPYGGSTYYADSVKGRFTISADTSKNTAYLQMNSLRAEDTAVYYCARRHWPGGFDYWGQGTLVTVSSASTKGPSVFPLAPSSKSTSGGTAALGCLVKDYFPEPVTVSWNSGALTSGVHTFPAVLQSSGLYSLSSVVTVPSSSLGTQTYICNVNHKPSNTKVDKKVEPKSCDKTHTCPPCPAPELLGGPSVFLFPPKPKDTLMISRTPEVTCVVVDVSHEDPEVKFNWYVDGVEVHNAKTKPREEQYASTYRVVSVLTVLHQDWLNGKEYKCKVSNKALPAPIEKTISKAKGQPREPQVYTLPPSREEMTKNQVSLTCLVKGFYPSDIAVEWESNGQPENNYKTTPPVLDSDGSFFLYSKLTVDKSRWQQGNVFSCSVMHEALHNHYTQKSLSLSPGK

SEQ ID NO: 613 - protein, 580 aa, synthetic construct
  REGION 1..580: note = CD86 IgV-Q25I/F33L/I89F/H90I-atezolizumab antibody heavy chain
APLKIQAYFNETADLPCQFANSQNISLSELVVLWQDQENLVLNEVYLGKEKFDSVHSKYMGRTSFDSDSWTLRLHNLQIKDKGLYQCIFIHKKPTGMIRIHQMNSELSVLAGGGGSGGGGSGGGGSGGGGSGEVQLVESGGGLVQPGGSLRLSCAASGFTFSDSWIHWVRQAPGKGLEWVAWISPYGGSTYYADSVKGRFTISADTSKNTAYLQMNSLRAEDTAVYYCARRHWPGGFDYWGQGTLVTVSSASTKGPSVFPLAPSSKSTSGGTAALGCLVKDYFPEPVTVSWNSGALTSGVHTFPAVLQSSGLYSLSSVVTVPSSSLGTQTYICNVNHKPSNTKVDKKVEPKSCDKTHTCPPCPAPELLGGPSVFLFPPKPKDTLMISRTPEVTCVVVDVSHEDPEVKFNWYVDGVEVHNAKTKPREEQYASTYRVVSVLTVLHQDWLNGKEYKCKVSNKALPAPIEKTISKAKGQPREPQVYTLPPSREEMTKNQVSLTCLVKGFYPSDIAVEWESNGQPENNYKTTPPVLDSDGSFFLYSKLTVDKSRWQQGNVFSCSVMHEALHNHYTQKSLSLSPGK

SEQ ID NO: 614 - protein, 580 aa, synthetic construct
  REGION 1..580: note = CD86 IgV-Q25I/F33L/I89M/H90I-atezolizumab antibody heavy chain
APLKIQAYFNETADLPCQFANSQNISLSELVVLWQDQENLVLNEVYLGKEKFDSVHSKYMGRTSFDSDSWTLRLHNLQIKDKGLYQCIMIHKKPTGMIRIHQMNSELSVLAGGGGSGGGGSGGGGSGGGGSGEVQLVESGGGLVQPGGSLRLSCAASGFTFSDSWIHWVRQAPGKGLEWVAWISPYGGSTYYADSVKGRFTISADTSKNTAYLQMNSLRAEDTAVYYCARRHWPGGFDYWGQGTLVTVSSASTKGPSVFPLAPSSKSTSGGTAALGCLVKDYFPEPVTVSWNSGALTSGVHTFPAVLQSSGLYSLSSVVTVPSSSLGTQTYICNVNHKPSNTKVDKKVEPKSCDKTHTCPPCPAPELLGGPSVFLFPPKPKDTLMISRTPEVTCVVVDVSHEDPEVKFNWYVDGVEVHNAKTKPREEQYASTYRVVSVLTVLHQDWLNGKEYKCKVSNKALPAPIEKTISKAKGQPREPQVYTLPPSREEMTKNQVSLTCLVKGFYPSDIAVEWESNGQPENNYKTTPPVLDSDGSFFLYSKLTVDKSRWQQGNVFSCSVMHEALHNHYTQKSLSLSPGK

SEQ ID NO: 615 - protein, 580 aa, synthetic construct
  REGION 1..580: note = CD86 IgV-Q25I/F33L/H90M-atezolizumab antibody heavy chain
APLKIQAYFNETADLPCQFANSQNISLSELVVLWQDQENLVLNEVYLGKEKFDSVHSKYMGRTSFDSDSWTLRLHNLQIKDKGLYQCIIMHKKPTGMIRIHQMNSELSVLAGGGGSGGGGSGGGGSGGGGSGEVQLVESGGGLVQPGGSLRLSCAASGFTFSDSWIHWVRQAPGKGLEWVAWISPYGGSTYYADSVKGRFTISADTSKNTAYLQMNSLRAEDTAVYYCARRHWPGGFDYWGQGTLVTVSSASTKGPSVFPLAPSSKSTSGGTAALGCLVKDYFPEPVTVSWNSGALTSGVHTFPAVLQSSGLYSLSSVVTVPSSSLGTQTYICNVNHKPSNTKVDKKVEPKSCDKTHTCPPCPAPELLGGPSVFLFPPKPKDTLMISRTPEVTCVVVDVSHEDPEVKFNWYVDGVEVHNAKTKPREEQYASTYRVVSVLTVLHQDWLNGKEYKCKVSNKALPAPIEKTISKAKGQPREPQVYTLPPSREEMTKNQVSLTCLVKGFYPSDIAVEWESNGQPENNYKTTPPVLDSDGSFFLYSKLTVDKSRWQQGNVFSCSVMHEALHNHYTQKSLSLSPGK

SEQ ID NO: 616 - protein, 455 aa, synthetic construct
  REGION 1..455: note = CD3B219 antibody heavy chain
EVQLVESGGGLVQPGGSLRLSCAASGFTFNTYAMNWVRQAPGKGLEWVARIRSKYNNYATYYAASVKGRFTISRDDSKNSLYLQMNSLKTEDTAVYYCARHGNFGNSYVSWFAYWGQGTLVTVSSASTKGPSVFPLAPSSKSTSGGTAALGCLVKDYFPEPVTVSWNSGALTSGVHTFPAVLQSSGLYSLSSVVTVPSSSLGTQTYICNVNHKPSNTKVDKKVEPKSCDKTHTCPPCPAPELLGGPSVFLFPPKPKDTLMISRTPEVTCVVVDVSHEDPEVKFNWYVDGVEVHNAKTKPREEQYNSTYRVVSVLTVLHQDWLNGKEYKCKVSNKALPAPIEKTISKAKGQPREPQVYTLPPSRDELTKNQVSLTCLVKGFYPSDIAVEWESNGQPENNYKTTPPVLDSDGSFFLYSKLTVDKSRWQQGNVFSCSVMHEALHNHYTQKSLSLSPGK

SEQ ID NO: 617 - protein, 215 aa, synthetic construct
  REGION 1..215: note = CD3B219 antibody light chain
QTVVTQEPSLTVSPGGTVTLTCRSSTGAVTTSNYANWVQQKPGQAPRGLIGGTNKRAPGTPARFSGSLLGGKAALTLSGVQPEDEAEYYCALWYSNLWVFGGGTKLTVLGQPKAAPSVTLFPPSSEELQANKATLVCLISDFYPGAVTVAWKADSSPVKAGVETTTPSKQSNNKYAASSYLSLTPEQWKSHRSYSCQVTHEGSTVEKTVAPTECS

SEQ ID NO: 618 - protein, 700 aa, synthetic construct
  REGION 1..700: note = CD3B219-CD86 ECD-Q25I/F33L/H90I
EVQLVESGGGLVQPGGSLRLSCAASGFTFNTYAMNWVRQAPGKGLEWVARIRSKYNNYATYYAASVKGRFTISRDDSKNSLYLQMNSLKTEDTAVYYCARHGNFGNSYVSWFAYWGQGTLVTVSSASTKGPSVFPLAPSSKSTSGGTAALGCLVKDYFPEPVTVSWNSGALTSGVHTFPAVLQSSGLYSLSSVVTVPSSSLGTQTYICNVNHKPSNTKVDKKVEPKSCDKTHTCPPCPAPELLGGPSVFLFPPKPKDTLMISRTPEVTCVVVDVSHEDPEVKFNWYVDGVEVHNAKTKPREEQYNSTYRVVSVLTVLHQDWLNGKEYKCKVSNKALPAPIEKTISKAKGQPREPQVYTLPPSRDELTKNQVSLTCLVKGFYPSDIAVEWESNGQPENNYKTTPPVLDSDGSFFLYSKLTVDKSRWQQGNVFSCSVMHEALHNHYTQKSLSLSPGAGGGGSGGGGSGGGGSGGGGSGAPLKIQAYFNETADLPCQFANSQNISLSELVVLWQDQENLVLNEVYLGKEKFDSVHSKYMGRTSFDSDSWTLRLHNLQIKDKGLYQCIIIHKKPTGMIRIHQMNSELSVLANFSQPEIVPISNITENVYINLTCSSIHGYPEPKKMSVLLRTKNSTIEYDGVMQKSQDNVTELYDVSISLSVSFPDVTSNMTIFCILETDKTRLLSSPFSIELEDPQPPPDHIP

SEQ ID NO: 619 - protein, 700 aa, synthetic construct
  REGION 1..700: note = CD3B219-CD86 ECD-Q25V/F33L/H90I
EVQLVESGGGLVQPGGSLRLSCAASGFTFNTYAMNWVRQAPGKGLEWVARIRSKYNNYATYYAASVKGRFTISRDDSKNSLYLQMNSLKTEDTAVYYCARHGNFGNSYVSWFAYWGQGTLVTVSSASTKGPSVFPLAPSSKSTSGGTAALGCLVKDYFPEPVTVSWNSGALTSGVHTFPAVLQSSGLYSLSSVVTVPSSSLGTQTYICNVNHKPSNTKVDKKVEPKSCDKTHTCPPCPAPELLGGPSVFLFPPKPKDTLMISRTPEVTCVVVDVSHEDPEVKFNWYVDGVEVHNAKTKPREEQYNSTYRVVSVLTVLHQDWLNGKEYKCKVSNKALPAPIEKTISKAKGQPREPQVYTLPPSRDELTKNQVSLTCLVKGFYPSDIAVEWESNGQPENNYKTTPPVLDSDGSFFLYSKLTVDKSRWQQGNVFSCSVMHEALHNHYTQKSLSLSPGAGGGGSGGGGSGGGGSGGGGSGAPLKIQAYFNETADLPCQFANSQNVSLSELVVLWQDQENLVLNEVYLGKEKFDSVHSKYMGRTSFDSDSWTLRLHNLQIKDKGLYQCIIIHKKPTGMIRIHQMNSELSVLANFSQPEIVPISNITENVYINLTCSSIHGYPEPKKMSVLLRTKNSTIEYDGVMQKSQDNVTELYDVSISLSVSFPDVTSNMTIFCILETDKTRLLSSPFSIELEDPQPPPDHIP

SEQ ID NO: 620 - protein, 700 aa, synthetic construct
  REGION 1..700: note = CD3B219-CD86 ECD-Q25V/F33V/H90I
EVQLVESGGGLVQPGGSLRLSCAASGFTFNTYAMNWVRQAPGKGLEWVARIRSKYNNYATYYAASVKGRFTISRDDSKNSLYLQMNSLKTEDTAVYYCARHGNFGNSYVSWFAYWGQGTLVTVSSASTKGPSVFPLAPSSKSTSGGTAALGCLVKDYFPEPVTVSWNSGALTSGVHTFPAVLQSSGLYSLSSVVTVPSSSLGTQTYICNVNHKPSNTKVDKKVEPKSCDKTHTCPPCPAPELLGGPSVFLFPPKPKDTLMISRTPEVTCVVVDVSHEDPEVKFNWYVDGVEVHNAKTKPREEQYNSTYRVVSVLTVLHQDWLNGKEYKCKVSNKALPAPIEKTISKAKGQPREPQVYTLPPSRDELTKNQVSLTCLVKGFYPSDIAVEWESNGQPENNYKTTPPVLDSDGSFFLYSKLTVDKSRWQQGNVFSCSVMHEALHNHYTQKSLSLSPGAGGGGSGGGGSGGGGSGGGGSGAPLKIQAYFNETADLPCQFANSQNVSLSELVVVWQDQENLVLNEVYLGKEKFDSVHSKYMGRTSFDSDSWTLRLHNLQIKDKGLYQCIIIHKKPTGMIRIHQMNSELSVLANFSQPEIVPISNITENVYINLTCSSIHGYPEPKKMSVLLRTKNSTIEYDGVMQKSQDNVTELYDVSISLSVSFPDVTSNMTIFCILETDKTRLLSSPFSIELEDPQPPPDHIP

SEQ ID NO: 621 - protein, 700 aa, synthetic construct
  REGION 1..700: note = CD3B219-CD86 ECD-A13I/Q25I/F33L/H90I
EVQLVESGGGLVQPGGSLRLSCAASGFTFNTYAMNWVRQAPGKGLEWVARIRSKYNNYATYYAASVKGRFTISRDDSKNSLYLQMNSLKTEDTAVYYCARHGNFGNSYVSWFAYWGQGTLVTVSSASTKGPSVFPLAPSSKSTSGGTAALGCLVKDYFPEPVTVSWNSGALTSGVHTFPAVLQSSGLYSLSSVVTVPSSSLGTQTYICNVNHKPSNTKVDKKVEPKSCDKTHTCPPCPAPELLGGPSVFLFPPKPKDTLMISRTPEVTCVVVDVSHEDPEVKFNWYVDGVEVHNAKTKPREEQYNSTYRVVSVLTVLHQDWLNGKEYKCKVSNKALPAPIEKTISKAKGQPREPQVYTLPPSRDELTKNQVSLTCLVKGFYPSDIAVEWESNGQPENNYKTTPPVLDSDGSFFLYSKLTVDKSRWQQGNVFSCSVMHEALHNHYTQKSLSLSPGAGGGGSGGGGSGGGGSGGGGSGAPLKIQAYFNETLDLPCQFANSQNISLSELVVLWQDQENLVLNEVYLGKEKFDSVHSKYMGRTSFDSDSWTLRLHNLQIKDKGLYQCIIIHKKPTGMIRIHQMNSELSVLANFSQPEIVPISNITENVYINLTCSSIHGYPEPKKMSVLLRTKNSTIEYDGVMQKSQDNVTELYDVSISLSVSFPDVTSNMTIFCILETDKTRLLSSPFSIELEDPQPPPDHIP

SEQ ID NO: 622 - protein, 700 aa, synthetic construct
  REGION 1..700: note = CD3B219-CD86 ECD-Q25I/H90I
EVQLVESGGGLVQPGGSLRLSCAASGFTFNTYAMNWVRQAPGKGLEWVARIRSKYNNYATYYAASVKGRFTISRDDSKNSLYLQMNSLKTEDTAVYYCARHGNFGNSYVSWFAYWGQGTLVTVSSASTKGPSVFPLAPSSKSTSGGTAALGCLVKDYFPEPVTVSWNSGALTSGVHTFPAVLQSSGLYSLSSVVTVPSSSLGTQTYICNVNHKPSNTKVDKKVEPKSCDKTHTCPPCPAPELLGGPSVFLFPPKPKDTLMISRTPEVTCVVVDVSHEDPEVKFNWYVDGVEVHNAKTKPREEQYNSTYRVVSVLTVLHQDWLNGKEYKCKVSNKALPAPIEKTISKAKGQPREPQVYTLPPSRDELTKNQVSLTCLVKGFYPSDIAVEWESNGQPENNYKTTPPVLDSDGSFFLYSKLTVDKSRWQQGNVFSCSVMHEALHNHYTQKSLSLSPGAGGGGSGGGGSGGGGSGGGGSGAPLKIQAYFNETADLPCQFANSQNISLSELVVFWQDQENLVLNEVYLGKEKFDSVHSKYMGRTSFDSDSWTLRLHNLQIKDKGLYQCIIIHKKPTGMIRIHQMNSELSVLANFSQPEIVPISNITENVYINLTCSSIHGYPEPKKMSVLLRTKNSTIEYDGVMQKSQDNVTELYDVSISLSVSFPDVTSNMTIFCILETDKTRLLSSPFSIELEDPQPPPDHIP

SEQ ID NO: 623 - protein, 700 aa, synthetic construct
  REGION 1..700: note = CD3B219-CD86 ECD-Q25V/H90V
EVQLVESGGGLVQPGGSLRLSCAASGFTFNTYAMNWVRQAPGKGLEWVARIRSKYNNYATYYAASVKGRFTISRDDSKNSLYLQMNSLKTEDTAVYYCARHGNFGNSYVSWFAYWGQGTLVTVSSASTKGPSVFPLAPSSKSTSGGTAALGCLVKDYFPEPVTVSWNSGALTSGVHTFPAVLQSSGLYSLSSVVTVPSSSLGTQTYICNVNHKPSNTKVDKKVEPKSCDKTHTCPPCPAPELLGGPSVFLFPPKPKDTLMISRTPEVTCVVVDVSHEDPEVKFNWYVDGVEVHNAKTKPREEQYNSTYRVVSVLTVLHQDWLNGKEYKCKVSNKALPAPIEKTISKAKGQPREPQVYTLPPSRDELTKNQVSLTCLVKGFYPSDIAVEWESNGQPENNYKTTPPVLDSDGSFFLYSKLTVDKSRWQQGNVFSCSVMHEALHNHYTQKSLSLSPGAGGGGSGGGGSGGGGSGGGGSGAPLKIQAYFNETADLPCQFANSQNVSLSELVVFWQDQENLVLNEVYLGKEKFDSVHSKYMGRTSFDSDSWTLRLHNLQIKDKGLYQCIIVHKKPTGMIRIHQMNSELSVLANFSQPEIVPISNITENVYINLTCSSIHGYPEPKKMSVLLRTKNSTIEYDGVMQKSQDNVTELYDVSISLSVSFPDVTSNMTIFCILETDKTRLLSSPFSIELEDPQPPPDHIP

SEQ ID NO: 624 - protein, 700 aa, synthetic construct
  REGION 1..700: note = CD3B219-CD86 ECD-Q25V/H90I
EVQLVESGGGLVQPGGSLRLSCAASGFTFNTYAMNWVRQAPGKGLEWVARIRSKYNNYATYYAASVKGRFTISRDDSKNSLYLQMNSLKTEDTAVYYCARHGNFGNSYVSWFAYWGQGTLVTVSSASTKGPSVFPLAPSSKSTSGGTAALGCLVKDYFPEPVTVSWNSGALTSGVHTFPAVLQSSGLYSLSSVVTVPSSSLGTQTYICNVNHKPSNTKVDKKVEPKSCDKTHTCPPCPAPELLGGPSVFLFPPKPKDTLMISRTPEVTCVVVDVSHEDPEVKFNWYVDGVEVHNAKTKPREEQYNSTYRVVSVLTVLHQDWLNGKEYKCKVSNKALPAPIEKTISKAKGQPREPQVYTLPPSRDELTKNQVSLTCLVKGFYPSDIAVEWESNGQPENNYKTTPPVLDSDGSFFLYSKLTVDKSRWQQGNVFSCSVMHEALHNHYTQKSLSLSPGAGGGGSGGGGSGGGGSGGGGSGAPLKIQAYFNETADLPCQFANSQNVSLSELVVFWQDQENLVLNEVYLGKEKFDSVHSKYMGRTSFDSDSWTLRLHNLQIKDKGLYQCIIIHKKPTGMIRIHQMNSELSVLANFSQPEIVPISNITENVYINLTCSSIHGYPEPKKMSVLLRTKNSTIEYDGVMQKSQDNVTELYDVSISLSVSFPDVTSNMTIFCILETDKTRLLSSPFSIELEDPQPPPDHIP

SEQ ID NO: 625 - protein, 700 aa, synthetic construct
  REGION 1..700: note = CD3B219-CD86 ECD
EVQLVESGGGLVQPGGSLRLSCAASGFTFNTYAMNWVRQAPGKGLEWVARIRSKYNNYATYYAASVKGRFTISRDDSKNSLYLQMNSLKTEDTAVYYCARHGNFGNSYVSWFAYWGQGTLVTVSSASTKGPSVFPLAPSSKSTSGGTAALGCLVKDYFPEPVTVSWNSGALTSGVHTFPAVLQSSGLYSLSSVVTVPSSSLGTQTYICNVNHKPSNTKVDKKVEPKSCDKTHTCPPCPAPELLGGPSVFLFPPKPKDTLMISRTPEVTCVVVDVSHEDPEVKFNWYVDGVEVHNAKTKPREEQYNSTYRVVSVLTVLHQDWLNGKEYKCKVSNKALPAPIEKTISKAKGQPREPQVYTLPPSRDELTKNQVSLTCLVKGFYPSDIAVEWESNGQPENNYKTTPPVLDSDGSFFLYSKLTVDKSRWQQGNVFSCSVMHEALHNHYTQKSLSLSPGAGGGGSGGGGSGGGGSGGGGSGAPLKIQAYFNETADLPCQFANSQNQSLSELVVFWQDQENLVLNEVYLGKEKFDSVHSKYMGRTSFDSDSWTLRLHNLQIKDKGLYQCIIHHKKPTGMIRIHQMNSELSVLANFSQPEIVPISNITENVYINLTCSSIHGYPEPKKMSVLLRTKNSTIEYDGVMQKSQDNVTELYDVSISLSVSFPDVTSNMTIFCILETDKTRLLSSPFSIELEDPQPPPDHIP

SEQ ID NO: 626 - protein, 586 aa, synthetic construct
  REGION 1..586: note = CD3B219-CD86 IgV-Q25I/F33L/H90I
EVQLVESGGGLVQPGGSLRLSCAASGFTFNTYAMNWVRQAPGKGLEWVARIRSKYNNYATYYAASVKGRFTISRDDSKNSLYLQMNSLKTEDTAVYYCARHGNFGNSYVSWFAYWGQGTLVTVSSASTKGPSVFPLAPSSKSTSGGTAALGCLVKDYFPEPVTVSWNSGALTSGVHTFPAVLQSSGLYSLSSVVTVPSSSLGTQTYICNVNHKPSNTKVDKKVEPKSCDKTHTCPPCPAPELLGGPSVFLFPPKPKDTLMISRTPEVTCVVVDVSHEDPEVKFNWYVDGVEVHNAKTKPREEQYNSTYRVVSVLTVLHQDWLNGKEYKCKVSNKALPAPIEKTISKAKGQPREPQVYTLPPSRDELTKNQVSLTCLVKGFYPSDIAVEWESNGQPENNYKTTPPVLDSDGSFFLYSKLTVDKSRWQQGNVFSCSVMHEALHNHYTQKSLSLSPGAGGGGSGGGGSGGGGSGGGGSGAPLKIQAYFNETADLPCQFANSQNISLSELVVLWQDQENLVLNEVYLGKEKFDSVHSKYMGRTSFDSDSWTLRLHNLQIKDKGLYQCIIIHKKPTGMIRIHQMNSELSVL

SEQ ID NO: 627 - protein, 586 aa, synthetic construct
  REGION 1..586: note = CD3B219-CD86 IgV-Q25V/F33L/H90I
EVQLVESGGGLVQPGGSLRLSCAASGFTFNTYAMNWVRQAPGKGLEWVARIRSKYNNYATYYAASVKGRFTISRDDSKNSLYLQMNSLKTEDTAVYYCARHGNFGNSYVSWFAYWGQGTLVTVSSASTKGPSVFPLAPSSKSTSGGTAALGCLVKDYFPEPVTVSWNSGALTSGVHTFPAVLQSSGLYSLSSVVTVPSSSLGTQTYICNVNHKPSNTKVDKKVEPKSCDKTHTCPPCPAPELLGGPSVFLFPPKPKDTLMISRTPEVTCVVVDVSHEDPEVKFNWYVDGVEVHNAKTKPREEQYNSTYRVVSVLTVLHQDWLNGKEYKCKVSNKALPAPIEKTISKAKGQPREPQVYTLPPSRDELTKNQVSLTCLVKGFYPSDIAVEWESNGQPENNYKTTPPVLDSDGSFFLYSKLTVDKSRWQQGNVFSCSVMHEALHNHYTQKSLSLSPGAGGGGSGGGGSGGGGSGGGGSGAPLKIQAYFNETADLPCQFANSQNVSLSELVVLWQDQENLVLNEVYLGKEKFDSVHSKYMGRTSFDSDSWTLRLHNLQIKDKGLYQCIIIHKKPTGMIRIHQMNSELSVL

SEQ ID NO: 628 - protein, 586 aa, synthetic construct
  REGION 1..586: note = CD3B219-CD86 IgV-Q25V/F33V/H90I
EVQLVESGGGLVQPGGSLRLSCAASGFTFNTYAMNWVRQAPGKGLEWVARIRSKYNNYATYYAASVKGRFTISRDDSKNSLYLQMNSLKTEDTAVYYCARHGNFGNSYVSWFAYWGQGTLVTVSSASTKGPSVFPLAPSSKSTSGGTAALGCLVKDYFPEPVTVSWNSGALTSGVHTFPAVLQSSGLYSLSSVVTVPSSSLGTQTYICNVNHKPSNTKVDKKVEPKSCDKTHTCPPCPAPELLGGPSVFLFPPKPKDTLMISRTPEVTCVVVDVSHEDPEVKFNWYVDGVEVHNAKTKPREEQYNSTYRVVSVLTVLHQDWLNGKEYKCKVSNKALPAPIEKTISKAKGQPREPQVYTLPPSRDELTKNQVSLTCLVKGFYPSDIAVEWESNGQPENNYKTTPPVLDSDGSFFLYSKLTVDKSRWQQGNVFSCSVMHEALHNHYTQKSLSLSPGAGGGGSGGGGSGGGGSGGGGSGAPLKIQAYFNETADLPCQFANSQNVSLSELVVVWQDQENLVLNEVYLGKEKFDSVHSKYMGRTSFDSDSWTLRLHNLQIKDKGLYQCIIIHKKPTGMIRIHQMNSELSVL

SEQ ID NO: 629 - protein, 586 aa, synthetic construct
  REGION 1..586: note = CD3B219-CD86 IgV-A13I/Q25I/F33L/H90I
EVQLVESGGGLVQPGGSLRLSCAASGFTFNTYAMNWVRQAPGKGLEWVARIRSKYNNYATYYAASVKGRFTISRDDSKNSLYLQMNSLKTEDTAVYYCARHGNFGNSYVSWFAYWGQGTLVTVSSASTKGPSVFPLAPSSKSTSGGTAALGCLVKDYFPEPVTVSWNSGALTSGVHTFPAVLQSSGLYSLSSVVTVPSSSLGTQTYICNVNHKPSNTKVDKKVEPKSCDKTHTCPPCPAPELLGGPSVFLFPPKPKDTLMISRTPEVTCVVVDVSHEDPEVKFNWYVDGVEVHNAKTKPREEQYNSTYRVVSVLTVLHQDWLNGKEYKCKVSNKALPAPIEKTISKAKGQPREPQVYTLPPSRDELTKNQVSLTCLVKGFYPSDIAVEWESNGQPENNYKTTPPVLDSDGSFFLYSKLTVDKSRWQQGNVFSCSVMHEALHNHYTQKSLSLSPGAGGGGSGGGGSGGGGSGGGGSGAPLKIQAYFNETIDLPCQFANSQNISLSELVVLWQDQENLVLNEVYLGKEKFDSVHSKYMGRTSFDSDSWTLRLHNLQIKDKGLYQCIIIHKKPTGMIRIHQMNSELSVL

SEQ ID NO: 630 - protein, 586 aa, synthetic construct
  REGION 1..586: note = CD3B219-CD86 IgV-Q25I/H90I
EVQLVESGGGLVQPGGSLRLSCAASGFTFNTYAMNWVRQAPGKGLEWVARIRSKYNNYATYYAASVKGRFTISRDDSKNSLYLQMNSLKTEDTAVYYCARHGNFGNSYVSWFAYWGQGTLVTVSSASTKGPSVFPLAPSSKSTSGGTAALGCLVKDYFPEPVTVSWNSGALTSGVHTFPAVLQSSGLYSLSSVVTVPSSSLGTQTYICNVNHKPSNTKVDKKVEPKSCDKTHTCPPCPAPELLGGPSVFLFPPKPKDTLMISRTPEVTCVVVDVSHEDPEVKFNWYVDGVEVHNAKTKPREEQYNSTYRVVSVLTVLHQDWLNGKEYKCKVSNKALPAPIEKTISKAKGQPREPQVYTLPPSRDELTKNQVSLTCLVKGFYPSDIAVEWESNGQPENNYKTTPPVLDSDGSFFLYSKLTVDKSRWQQGNVFSCSVMHEALHNHYTQKSLSLSPGAGGGGSGGGGSGGGGSGGGGSGAPLKIQAYFNETADLPCQFANSQNISLSELVVFWQDQENLVLNEVYLGKEKFDSVHSKYMGRTSFDSDSWTLRLHNLQIKDKGLYQCIIIHKKPTGMIRIHQMNSELSVL

SEQ ID NO: 631 - protein, 586 aa, synthetic construct
  REGION 1..586: note = CD3B219-CD86 IgV-Q25V/H90V
EVQLVESGGGLVQPGGSLRLSCAASGFTFNTYAMNWVRQAPGKGLEWVARIRSKYNNYATYYAASVKGRFTISRDDSKNSLYLQMNSLKTEDTAVYYCARHGNFGNSYVSWFAYWGQGTLVTVSSASTKGPSVFPLAPSSKSTSGGTAALGCLVKDYFPEPVTVSWNSGALTSGVHTFPAVLQSSGLYSLSSVVTVPSSSLGTQTYICNVNHKPSNTKVDKKVEPKSCDKTHTCPPCPAPELLGGPSVFLFPPKPKDTLMISRTPEVTCVVVDVSHEDPEVKFNWYVDGVEVHNAKTKPREEQYNSTYRVVSVLTVLHQDWLNGKEYKCKVSNKALPAPIEKTISKAKGQPREPQVYTLPPSRDELTKNQVSLTCLVKGFYPSDIAVEWESNGQPENNYKTTPPVLDSDGSFFLYSKLTVDKSRWQQGNVFSCSVMHEALHNHYTQKSLSLSPGAGGGGSGGGGSGGGGSGGGGSGAPLKIQAYFNETADLPCQFANSQNVSLSELVVFWQDQENLVLNEVYLGKEKFDSVHSKYMGRTSFDSDSWTLRLHNLQIKDKGLYQCIIVHKKPTGMIRIHQMNSELSVL

SEQ ID NO: 632 - protein, 586 aa, synthetic construct
  REGION 1..586: note = CD3B219-CD86 IgV-Q25V/H90I
EVQLVESGGGLVQPGGSLRLSCAASGFTFNTYAMNWVRQAPGKGLEWVARIRSKYNNYATYYAASVKGRFTISRDDSKNSLYLQMNSLKTEDTAVYYCARHGNFGNSYVSWFAYWGQGTLVTVSSASTKGPSVFPLAPSSKSTSGGTAALGCLVKDYFPEPVTVSWNSGALTSGVHTFPAVLQSSGLYSLSSVVTVPSSSLGTQTYICNVNHKPSNTKVDKKVEPKSCDKTHTCPPCPAPELLGGPSVFLFPPKPKDTLMISRTPEVTCVVVDVSHEDPEVKFNWYVDGVEVHNAKTKPREEQYNSTYRVVSVLTVLHQDWLNGKEYKCKVSNKALPAPIEKTISKAKGQPREPQVYTLPPSRDELTKNQVSLTCLVKGFYPSDIAVEWESNGQPENNYKTTPPVLDSDGSFFLYSKLTVDKSRWQQGNVFSCSVMHEALHNHYTQKSLSLSPGAGGGGSGGGGSGGGGSGGGGSGAPLKIQAYFNETADLPCQFANSQNVSLSELVVFWQDQENLVLNEVYLGKEKFDSVHSKYMGRTSFDSDSWTLRLHNLQIKDKGLYQCIIIHKKPTGMIRIHQMNSELSVL

SEQ ID NO: 633 - protein, 586 aa, synthetic construct
  REGION 1..586: note = CD3B219-CD86 IgV
EVQLVESGGGLVQPGGSLRLSCAASGFTFNTYAMNWVRQAPGKGLEWVARIRSKYNNYATYYAASVKGRFTISRDDSKNSLYLQMNSLKTEDTAVYYCARHGNFGNSYVSWFAYWGQGTLVTVSSASTKGPSVFPLAPSSKSTSGGTAALGCLVKDYFPEPVTVSWNSGALTSGVHTFPAVLQSSGLYSLSSVVTVPSSSLGTQTYICNVNHKPSNTKVDKKVEPKSCDKTHTCPPCPAPELLGGPSVFLFPPKPKDTLMISRTPEVTCVVVDVSHEDPEVKFNWYVDGVEVHNAKTKPREEQYNSTYRVVSVLTVLHQDWLNGKEYKCKVSNKALPAPIEKTISKAKGQPREPQVYTLPPSRDELTKNQVSLTCLVKGFYPSDIAVEWESNGQPENNYKTTPPVLDSDGSFFLYSKLTVDKSRWQQGNVFSCSVMHEALHNHYTQKSLSLSPGAGGGGSGGGGSGGGGSGGGGSGAPLKIQAYFNETADLPCQFANSQNQSLSELVVFWQDQENLVLNEVYLGKEKFDSVHSKYMGRTSFDSDSWTLRLHNLQIKDKGLYQCIIHHKKPTGMIRIHQMNSELSVL

SEQ ID NO: 634 - protein, 228 aa, synthetic construct
  REGION 1..228: note = human IgG2 Fc
ERKCCVECPPCPAPPVAGPSVFLFPPKPKDTLMISRTPEVTCVVVDVSHEDPEVQFNWYVDGVEVHNAKTKPREEQFNSTFRVVSVLTVVHQDWLNGKEYKCKVSNKGLPAPIEKTISKTKGQPREPQVYTLPPSREEMTKNQVSLTCLVKGFYPSDISVEWESNGQPENNYKTTPPMLDSDGSFFLYSKLTVDKSRWQQGNVFSCSVMHEALHNHYTQKSLSLSPGK

SEQ ID NO: 635 - protein, 279 aa, synthetic construct
  REGION 1..279: note = human IgG3 Fc
ELKTPLGDTTHTCPRCPEPKSCDTPPPCPRCPEPKSCDTPPPCPRCPEPKSCDTPPPCPRCPAPELLGGPSVFLFPPKPKDTLMISRTPEVTCVVVDVSHEDPEVQFKWYVDGVEVHNAKTKPREEQYNSTFRVVSVLTVLHQDWLNGKEYKCKVSNKALPAPIEKTISKTKGQPREPQVYTLPPSREEMTKNQVSLTCLVKGFYPSDIAVEWESSGQPENNYNTTPPMLDSDGSFFLYSKLTVDKSRWQQGNIFSCSVMHEALHNRFTQKSLSLSPGK

SEQ ID NO: 636 - protein, 227 aa, synthetic construct
  REGION 1..227: note = mouse IgG1 Fc
VPRDCGCKPCICTVPEVSSVFIFPPKPKDVLTITLTPKVTCVVVDISKDDPEVQFSWFVDDVEVHTAQTQPREEQFNSTFRSVSELPIMHQDWLNGKEFKCRVNSAAFPAPIEKTISKTKGRPKAPQVYTIPPPKEQMAKDKVSLTCMITDFFPEDITVEWQWNGQPAENYKNTQPIMNTNGSYFVYSKLNVQKSNWEAGNTFTCSVLHEGLHNHHTEKSLSHSPGK

SEQ ID NO: 637 - protein, 233 aa, synthetic construct
  REGION 1..233: note = mouse IgG2a Fc
EPRGPTIKPCPPCKCPAPNLLGGPSVFIFPPKIKDVLMISLSPIVTCVVVDVSEDDPDVQISWFVNNVEVHTAQTQTHREDYNSTLRVVSALPIQHQDWMSGKEFKCKVNNKDLPAPIERTISKPKGSVRAPQVYVLPPPEEEMTKKQVTLTCMVTDFMPEDIYVEWTNNGKTELNYKNTEPVLDSDGSYFMYSKLRVEKKNWVERNSYSCSVVHEGLHNHHTTKSFSRTPGK

SEQ ID NO: 638 - protein, 308 aa, synthetic construct
  REGION 1..308: note = mouse IgG2b Fc
EPSGPISTINPCPPCKECHKCPAPNLEGGPSVFIFPPNIKDVLMISLTPKVTCVVVDVSEDDPDVQISWFVNNVEVHTAQTQTHREDYNSTIRVVSTLPIQHQDWMSGKEFKCKVNNKDLPSPIERTISKIKGLVRAPQVYILPPPAEQLSRKDVSLTCLVVGFNPGDISVEWTSNGHTEENYKDTAPVLDSDGSYFIYSKLNMKTSKWEKTDSFSCNVRHEGLKNYYLKKTISRSPGLDLDDICAEAKDGELDGLWTTITIFISLFLLSVCYSASVTLFKVKWIFSSVVELKQKISPDYRNMIGQGA

SEQ ID NO: 639 - protein, 302 aa, synthetic construct
  REGION 1..302: note = mouse IgG3 Fc
EPRIPKPSTPPGSSCPPGNILGGPSVFIFPPKPKDALMISLTPKVTCVVVDVSEDDPDVHVSWFVDNKEVHTAWTQPREAQYNSTFRVVSALPIQHQDWMRGKEFKCKVNNKALPAPIERTISKPKGRAQTPQVYTIPPPREQMSKKKVSLTCLVTNFFSEAISVEWERNGELEQDYKNTPPILDSDGTYFLYSKLTVDTDSWLQGEIFTCSVVHEALHNHHTQKNLSRSPELELNETCAEAQDGELDGLWTTITIFISLFLLSVCYSASVTLFKVKWIFSSVVQVKQTAIPDYRNMIGQGA

SEQ ID NO: 640 - protein, 258 aa, synthetic construct
  REGION 1..258: note = LAG3 97-122-Fc
RRYTVLSVGPGGLRSGRLPLQPRVQLEPKSCDKTHTCPPCPAPELLGGPSVFLFPPKPKDTLMISRTPEVTCVVVDVSHEDPEVKFNWYVDGVEVHNAKTKPREEQYNSTYRVVSVLTVLHQDWLNGKEYKCKVSNKALPAPIEKTISKAKGQPREPQVYTLPPSRDELTKNQVSLTCLVKGFYPSDIAVEWESNGQPENNYKTTPPVLDSDGSFFLYSKLTVDKSRWQQGNVFSCSVMHEALHNHYTQKSLSLSPGK

SEQ ID NO: 641 - protein, 265 aa, synthetic construct
  REGION 1..265: note = LAG3 97-129-Fc
RRYTVLSVGPGGLRSGRLPLQPRVQLDERGRQREPKSCDKTHTCPPCPAPELLGGPSVFLFPPKPKDTLMISRTPEVTCVVVDVSHEDPEVKFNWYVDGVEVHNAKTKPREEQYNSTYRVVSVLTVLHQDWLNGKEYKCKVSNKALPAPIEKTISKAKGQPREPQVYTLPPSRDELTKNQVSLTCLVKGFYPSDIAVEWESNGQPENNYKTTPPVLDSDGSFFLYSKLTVDKSRWQQGNVFSCSVMHEALHNHYTQKSLSLSPGK

SEQ ID NO: 642 - protein, 272 aa, synthetic construct
  REGION 1..272: note = LAG3 97-136-Fc
RRYTVLSVGPGGLRSGRLPLQPRVQLDERGRQRGDFSLWLEPKSCDKTHTCPPCPAPELLGGPSVFLFPPKPKDTLMISRTPEVTCVVVDVSHEDPEVKFNWYVDGVEVHNAKTKPREEQYNSTYRVVSVLTVLHQDWLNGKEYKCKVSNKALPAPIEKTISKAKGQPREPQVYTLPPSRDELTKNQVSLTCLVKGFYPSDIAVEWESNGQPENNYKTTPPVLDSDGSFFLYSKLTVDKSRWQQGNVFSCSVMHEALHNHYTQKSLSLSPGK

SEQ ID NO: 643 - protein, 282 aa, synthetic construct
  REGION 1..282: note = LAG3 97-146-Fc
RRYTVLSVGPGGLRSGRLPLQPRVQLDERGRQRGDFSLWLRPARRADAGEEPKSCDKTHTCPPCPAPELLGGPSVFLFPPKPKDTLMISRTPEVTCVVVDVSHEDPEVKFNWYVDGVEVHNAKTKPREEQYNSTYRVVSVLTVLHQDWLNGKEYKCKVSNKALPAPIEKTISKAKGQPREPQVYTLPPSRDELTKNQVSLTCLVKGFYPSDIAVEWESNGQPENNYKTTPPVLDSDGSFFLYSKLTVDKSRWQQGNVFSCSVMHEALHNHYTQKSLSLSPGK

SEQ ID NO: 644 - protein, 292 aa, synthetic construct
  REGION 1..292: note = LAG3 97-156-Fc
RRYTVLSVGPGGLRSGRLPLQPRVQLDERGRQRGDFSLWLRPARRADAGEYRAAVHLRDREPKSCDKTHTCPPCPAPELLGGPSVFLFPPKPKDTLMISRTPEVTCVVVDVSHEDPEVKFNWYVDGVEVHNAKTKPREEQYNSTYRVVSVLTVLHQDWLNGKEYKCKVSNKALPAPIEKTISKAKGQPREPQVYTLPPSRDELTKNQVSLTCLVKGFYPSDIAVEWESNGQPENNYKTTPPVLDSDGSFFLYSKLTVDKSRWQQGNVFSCSVMHEALHNHYTQKSLSLSPGK

SEQ ID NO: 645 - protein, 293 aa, synthetic construct
  REGION 1..293: note = LAG3 97-157-Fc
RRYTVLSVGPGGLRSGRLPLQPRVQLDERGRQRGDFSLWLRPARRADAGEYRAAVHLRDRAEPKSCDKTHTCPPCPAPELLGGPSVFLFPPKPKDTLMISRTPEVTCVVVDVSHEDPEVKFNWYVDGVEVHNAKTKPREEQYNSTYRVVSVLTVLHQDWLNGKEYKCKVSNKALPAPIEKTISKAKGQPREPQVYTLPPSRDELTKNQVSLTCLVKGFYPSDIAVEWESNGQPENNYKTTPPVLDSDGSFFLYSKLTVDKSRWQQGNVFSCSVMHEALHNHYTQKSLSLSPGK

SEQ ID NO: 646 - protein, 294 aa, synthetic construct
  REGION 1..294: note = LAG3 97-158-Fc
RRYTVLSVGPGGLRSGRLPLQPRVQLDERGRQRGDFSLWLRPARRADAGEYRAAVHLRDRALEPKSCDKTHTCPPCPAPELLGGPSVFLFPPKPKDTLMISRTPEVTCVVVDVSHEDPEVKFNWYVDGVEVHNAKTKPREEQYNSTYRVVSVLTVLHQDWLNGKEYKCKVSNKALPAPIEKTISKAKGQPREPQVYTLPPSRDELTKNQVSLTCLVKGFYPSDIAVEWESNGQPENNYKTTPPVLDSDGSFFLYSKLTVDKSRWQQGNVFSCSVMHEALHNHYTQKSLSLSPGK

SEQ ID NO: 647 - protein, 295 aa, synthetic construct
  REGION 1..295: note = LAG3 97-159-Fc
RRYTVLSVGPGGLRSGRLPLQPRVQLDERGRQRGDFSLWLRPARRADAGEYRAAVHLRDRALSEPKSCDKTHTCPPCPAPELLGGPSVFLFPPKPKDTLMISRTPEVTCVVVDVSHEDPEVKFNWYVDGVEVHNAKTKPREEQYNSTYRVVSVLTVLHQDWLNGKEYKCKVSNKALPAPIEKTISKAKGQPREPQVYTLPPSRDELTKNQVSLTCLVKGFYPSDIAVEWESNGQPENNYKTTPPVLDSDGSFFLYSKLTVDKSRWQQGNVFSCSVMHEALHNHYTQKSLSLSPGK

SEQ ID NO: 648 - protein, 296 aa, synthetic construct
  REGION 1..296: note = LAG3 97-160-Fc
RRYTVLSVGPGGLRSGRLPLQPRVQLDERGRQRGDFSLWLRPARRADAGEYRAAVHLRDRALSCEPKSCDKTHTCPPCPAPELLGGPSVFLFPPKPKDTLMISRTPEVTCVVVDVSHEDPEVKFNWYVDGVEVHNAKTKPREEQYNSTYRVVSVLTVLHQDWLNGKEYKCKVSNKALPAPIEKTISKAKGQPREPQVYTLPPSRDELTKNQVSLTCLVKGFYPSDIAVEWESNGQPENNYKTTPPVLDSDGSFFLYSKLTVDKSRWQQGNVFSCSVMHEALHNHYTQKSLSLSPGK

SEQ ID NO: 649 - protein, 297 aa, synthetic construct
  REGION 1..297: note = LAG3 97-161-Fc
RRYTVLSVGPGGLRSGRLPLQPRVQLDERGRQRGDFSLWLRPARRADAGEYRAAVHLRDRALSCREPKSCDKTHTCPPCPAPELLGGPSVFLFPPKPKDTLMISRTPEVTCVVVDVSHEDPEVKFNWYVDGVEVHNAKTKPREEQYNSTYRVVSVLTVLHQDWLNGKEYKCKVSNKALPAPIEKTISKAKGQPREPQVYTLPPSRDELTKNQVSLTCLVKGFYPSDIAVEWESNGQPENNYKTTPPVLDSDGSFFLYSKLTVDKSRWQQGNVFSCSVMHEALHNHYTQKSLSLSPGK

SEQ ID NO: 650 - protein, 298 aa, synthetic construct
  REGION 1..298: note = LAG3 97-162-Fc
RRYTVLSVGPGGLRSGRLPLQPRVQLDERGRQRGDFSLWLRPARRADAGEYRAAVHLRDRALSCRLEPKSCDKTHTCPPCPAPELLGGPSVFLFPPKPKDTLMISRTPEVTCVVVDVSHEDPEVKFNWYVDGVEVHNAKTKPREEQYNSTYRVVSVLTVLHQDWLNGKEYKCKVSNKALPAPIEKTISKAKGQPREPQVYTLPPSRDELTKNQVSLTCLVKGFYPSDIAVEWESNGQPENNYKTTPPVLDSDGSFFLYSKLTVDKSRWQQGNVFSCSVMHEALHNHYTQKSLSLSPGK

SEQ ID NO: 651 - protein, 299 aa, synthetic construct
  REGION 1..299: note = LAG3 97-163-Fc
RRYTVLSVGPGGLRSGRLPLQPRVQLDERGRQRGDFSLWLRPARRADAGEYRAAVHLRDRALSCRLREPKSCDKTHTCPPCPAPELLGGPSVFLFPPKPKDTLMISRTPEVTCVVVDVSHEDPEVKFNWYVDGVEVHNAKTKPREEQYNSTYRVVSVLTVLHQDWLNGKEYKCKVSNKALPAPIEKTISKAKGQPREPQVYTLPPSRDELTKNQVSLTCLVKGFYPSDIAVEWESNGQPENNYKTTPPVLDSDGSFFLYSKLTVDKSRWQQGNVFSCSVMHEALHNHYTQKSLSLSPGK

SEQ ID NO: 652 - protein, 300 aa, synthetic construct
  REGION 1..300: note = LAG3 97-164-Fc
RRYTVLSVGPGGLRSGRLPLQPRVQLDERGRQRGDFSLWLRPARRADAGEYRAAVHLRDRALSCRLRLEPKSCDKTHTCPPCPAPELLGGPSVFLFPPKPKDTLMISRTPEVTCVVVDVSHEDPEVKFNWYVDGVEVHNAKTKPREEQYNSTYRVVSVLTVLHQDWLNGKEYKCKVSNKALPAPIEKTISKAKGQPREPQVYTLPPSRDELTKNQVSLTCLVKGFYPSDIAVEWESNGQPENNYKTTPPVLDSDGSFFLYSKLTVDKSRWQQGNVFSCSVMHEALHNHYTQKSLSLSPGK

SEQ ID NO: 653 - protein, 301 aa, synthetic construct
  REGION 1..301: note = LAG3 97-165-Fc
RRYTVLSVGPGGLRSGRLPLQPRVQLDERGRQRGDFSLWLRPARRADAGEYRAAVHLRDRALSCRLRLREPKSCDKTHTCPPCPAPELLGGPSVFLFPPKPKDTLMISRTPEVTCVVVDVSHEDPEVKFNWYVDGVEVHNAKTKPREEQYNSTYRVVSVLTVLHQDWLNGKEYKCKVSNKALPAPIEKTISKAKGQPREPQVYTLPPSRDELTKNQVSLTCLVKGFYPSDIAVEWESNGQPENNYKTTPPVLDSDGSFFLYSKLTVDKSRWQQGNVFSCSVMHEALHNHYTQKSLSLSPGK

SEQ ID NO: 654 - protein, 302 aa, synthetic construct
  REGION 1..302: note = LAG3 97-166-Fc
RRYTVLSVGPGGLRSGRLPLQPRVQLDERGRQRGDFSLWLRPARRADAGEYRAAVHLRDRALSCRLRLRLEPKSCDKTHTCPPCPAPELLGGPSVFLFPPKPKDTLMISRTPEVTCVVVDVSHEDPEVKFNWYVDGVEVHNAKTKPREEQYNSTYRVVSVLTVLHQDWLNGKEYKCKVSNKALPAPIEKTISKAKGQPREPQVYTLPPSRDELTKNQVSLTCLVKGFYPSDIAVEWESNGQPENNYKTTPPVLDSDGSFFLYSKLTVDKSRWQQGNVFSCSVMHEALHNHYTQKSLSLSPGK

SEQ ID NO: 655 - protein, 303 aa, synthetic construct
  REGION 1..303: note = LAG3 97-167-Fc
RRYTVLSVGPGGLRSGRLPLQPRVQLDERGRQRGDFSLWLRPARRADAGEYRAAVHLRDRALSCRLRLRLGEPKSCDKTHTCPPCPAPELLGGPSVFLFPPKPKDTLMISRTPEVTCVVVDVSHEDPEVKFNWYVDGVEVHNAKTKPREEQYNSTYRVVSVLTVLHQDWLNGKEYKCKVSNKALPAPIEKTISKAKGQPREPQVYTLPPSRDELTKNQVSLTCLVKGFYPSDIAVEWESNGQPENNYKTTPPVLDSDGSFFLYSKLTVDKSRWQQGNVFSCSVMHEALHNHYTQKSLSLSPGK

SEQ ID NO: 656 - protein, 258 aa, synthetic construct
  REGION 1..258: note = LAG3 R97E 97-122-Fc
ERYTVLSVGPGGLRSGRLPLQPRVQLEPKSCDKTHTCPPCPAPELLGGPSVFLFPPKPKDTLMISRTPEVTCVVVDVSHEDPEVKFNWYVDGVEVHNAKTKPREEQYNSTYRVVSVLTVLHQDWLNGKEYKCKVSNKALPAPIEKTISKAKGQPREPQVYTLPPSRDELTKNQVSLTCLVKGFYPSDIAVEWESNGQPENNYKTTPPVLDSDGSFFLYSKLTVDKSRWQQGNVFSCSVMHEALHNHYTQKSLSLSPGK

SEQ ID NO: 657 - protein, 265 aa, synthetic construct
  REGION 1..265: note = LAG3 R97E 97-129-Fc
ERYTVLSVGPGGLRSGRLPLQPRVQLDERGRQREPKSCDKTHTCPPCPAPELLGGPSVFLFPPKPKDTLMISRTPEVTCVVVDVSHEDPEVKFNWYVDGVEVHNAKTKPREEQYNSTYRVVSVLTVLHQDWLNGKEYKCKVSNKALPAPIEKTISKAKGQPREPQVYTLPPSRDELTKNQVSLTCLVKGFYPSDIAVEWESNGQPENNYKTTPPVLDSDGSFFLYSKLTVDKSRWQQGNVFSCSVMHEALHNHYTQKSLSLSPGK

SEQ ID NO: 658 - protein, 272 aa, synthetic construct
  REGION 1..272: note = LAG3 R97E 97-136-Fc
ERYTVLSVGPGGLRSGRLPLQPRVQLDERGRQRGDFSLWLEPKSCDKTHTCPPCPAPELLGGPSVFLFPPKPKDTLMISRTPEVTCVVVDVSHEDPEVKFNWYVDGVEVHNAKTKPREEQYNSTYRVVSVLTVLHQDWLNGKEYKCKVSNKALPAPIEKTISKAKGQPREPQVYTLPPSRDELTKNQVSLTCLVKGFYPSDIAVEWESNGQPENNYKTTPPVLDSDGSFFLYSKLTVDKSRWQQGNVFSCSVMHEALHNHYTQKSLSLSPGK

SEQ ID NO: 659 - protein, 282 aa, synthetic construct
  REGION 1..282: note = LAG3 R97E 97-146-Fc
ERYTVLSVGPGGLRSGRLPLQPRVQLDERGRQRGDFSLWLRPARRADAGEEPKSCDKTHTCPPCPAPELLGGPSVFLFPPKPKDTLMISRTPEVTCVVVDVSHEDPEVKFNWYVDGVEVHNAKTKPREEQYNSTYRVVSVLTVLHQDWLNGKEYKCKVSNKALPAPIEKTISKAKGQPREPQVYTLPPSRDELTKNQVSLTCLVKGFYPSDIAVEWESNGQPENNYKTTPPVLDSDGSFFLYSKLTVDKSRWQQGNVFSCSVMHEALHNHYTQKSLSLSPGK

SEQ ID NO: 660 - protein, 292 aa, synthetic construct
  REGION 1..292: note = LAG3 R97E 97-156-Fc
ERYTVLSVGPGGLRSGRLPLQPRVQLDERGRQRGDFSLWLRPARRADAGEYRAAVHLRDREPKSCDKTHTCPPCPAPELLGGPSVFLFPPKPKDTLMISRTPEVTCVVVDVSHEDPEVKFNWYVDGVEVHNAKTKPREEQYNSTYRVVSVLTVLHQDWLNGKEYKCKVSNKALPAPIEKTISKAKGQPREPQVYTLPPSRDELTKNQVSLTCLVKGFYPSDIAVEWESNGQPENNYKTTPPVLDSDGSFFLYSKLTVDKSRWQQGNVFSCSVMHEALHNHYTQKSLSLSPGK

SEQ ID NO: 661 - protein, 293 aa, synthetic construct
  REGION 1..293: note = LAG3 R97E 97-157-Fc
ERYTVLSVGPGGLRSGRLPLQPRVQLDERGRQRGDFSLWLRPARRADAGEYRAAVHLRDRAEPKSCDKTHTCPPCPAPELLGGPSVFLFPPKPKDTLMISRTPEVTCVVVDVSHEDPEVKFNWYVDGVEVHNAKTKPREEQYNSTYRVVSVLTVLHQDWLNGKEYKCKVSNKALPAPIEKTISKAKGQPREPQVYTLPPSRDELTKNQVSLTCLVKGFYPSDIAVEWESNGQPENNYKTTPPVLDSDGSFFLYSKLTVDKSRWQQGNVFSCSVMHEALHNHYTQKSLSLSPGK

SEQ ID NO: 662 - protein, 294 aa, synthetic construct
  REGION 1..294: note = LAG3 R97E 97-158-Fc
ERYTVLSVGPGGLRSGRLPLQPRVQLDERGRQRGDFSLWLRPARRADAGEYRAAVHLRDRALEPKSCDKTHTCPPCPAPELLGGPSVFLFPPKPKDTLMISRTPEVTCVVVDVSHEDPEVKFNWYVDGVEVHNAKTKPREEQYNSTYRVVSVLTVLHQDWLNGKEYKCKVSNKALPAPIEKTISKAKGQPREPQVYTLPPSRDELTKNQVSLTCLVKGFYPSDIAVEWESNGQPENNYKTTPPVLDSDGSFFLYSKLTVDKSRWQQGNVFSCSVMHEALHNHYTQKSLSLSPGK

SEQ ID NO: 663 - protein, 295 aa, synthetic construct
  REGION 1..295: note = LAG3 R97E 97-159-Fc
ERYTVLSVGPGGLRSGRLPLQPRVQLDERGRQRGDFSLWLRPARRADAGEYRAAVHLRDRALSEPKSCDKTHTCPPCPAPELLGGPSVFLFPPKPKDTLMISRTPEVTCVVVDVSHEDPEVKFNWYVDGVEVHNAKTKPREEQYNSTYRVVSVLTVLHQDWLNGKEYKCKVSNKALPAPIEKTISKAKGQPREPQVYTLPPSRDELTKNQVSLTCLVKGFYPSDIAVEWESNGQPENNYKTTPPVLDSDGSFFLYSKLTVDKSRWQQGNVFSCSVMHEALHNHYTQKSLSLSPGK

SEQ ID NO: 664 - protein, 296 aa, synthetic construct
  REGION 1..296: note = LAG3 R97E 97-160-Fc
ERYTVLSVGPGGLRSGRLPLQPRVQLDERGRQRGDFSLWLRPARRADAGEYRAAVHLRDRALSCEPKSCDKTHTCPPCPAPELLGGPSVFLFPPKPKDTLMISRTPEVTCVVVDVSHEDPEVKFNWYVDGVEVHNAKTKPREEQYNSTYRVVSVLTVLHQDWLNGKEYKCKVSNKALPAPIEKTISKAKGQPREPQVYTLPPSRDELTKNQVSLTCLVKGFYPSDIAVEWESNGQPENNYKTTPPVLDSDGSFFLYSKLTVDKSRWQQGNVFSCSVMHEALHNHYTQKSLSLSPGK

SEQ ID NO: 665 - protein, 297 aa, synthetic construct
  REGION 1..297: note = LAG3 R97E 97-161-Fc
ERYTVLSVGPGGLRSGRLPLQPRVQLDERGRQRGDFSLWLRPARRADAGEYRAAVHLRDRALSCREPKSCDKTHTCPPCPAPELLGGPSVFLFPPKPKDTLMISRTPEVTCVVVDVSHEDPEVKFNWYVDGVEVHNAKTKPREEQYNSTYRVVSVLTVLHQDWLNGKEYKCKVSNKALPAPIEKTISKAKGQPREPQVYTLPPSRDELTKNQVSLTCLVKGFYPSDIAVEWESNGQPENNYKTTPPVLDSDGSFFLYSKLTVDKSRWQQGNVFSCSVMHEALHNHYTQKSLSLSPGK

SEQ ID NO: 666 - protein, 298 aa, synthetic construct
  REGION 1..298: note = LAG3 R97E 97-162-Fc
ERYTVLSVGPGGLRSGRLPLQPRVQLDERGRQRGDFSLWLRPARRADAGEYRAAVHLRDRALSCRLEPKSCDKTHTCPPCPAPELLGGPSVFLFPPKPKDTLMISRTPEVTCVVVDVSHEDPEVKFNWYVDGVEVHNAKTKPREEQYNSTYRVVSVLTVLHQDWLNGKEYKCKVSNKALPAPIEKTISKAKGQPREPQVYTLPPSRDELTKNQVSLTCLVKGFYPSDIAVEWESNGQPENNYKTTPPVLDSDGSFFLYSKLTVDKSRWQQGNVFSCSVMHEALHNHYTQKSLSLSPGK

SEQ ID NO: 667 - protein, 299 aa, synthetic construct
  REGION 1..299: note = LAG3 R97E 97-163-Fc
ERYTVLSVGPGGLRSGRLPLQPRVQLDERGRQRGDFSLWLRPARRADAGEYRAAVHLRDRALSCRLREPKSCDKTHTCPPCPAPELLGGPSVFLFPPKPKDTLMISRTPEVTCVVVDVSHEDPEVKFNWYVDGVEVHNAKTKPREEQYNSTYRVVSVLTVLHQDWLNGKEYKCKVSNKALPAPIEKTISKAKGQPREPQVYTLPPSRDELTKNQVSLTCLVKGFYPSDIAVEWESNGQPENNYKTTPPVLDSDGSFFLYSKLTVDKSRWQQGNVFSCSVMHEALHNHYTQKSLSLSPGK

SEQ ID NO: 668 - protein, 300 aa, synthetic construct
  REGION 1..300: note = LAG3 R97E 97-164-Fc
ERYTVLSVGPGGLRSGRLPLQPRVQLDERGRQRGDFSLWLRPARRADAGEYRAAVHLRDRALSCRLRLEPKSCDKTHTCPPCPAPELLGGPSVFLFPPKPKDTLMISRTPEVTCVVVDVSHEDPEVKFNWYVDGVEVHNAKTKPREEQYNSTYRVVSVLTVLHQDWLNGKEYKCKVSNKALPAPIEKTISKAKGQPREPQVYTLPPSRDELTKNQVSLTCLVKGFYPSDIAVEWESNGQPENNYKTTPPVLDSDGSFFLYSKLTVDKSRWQQGNVFSCSVMHEALHNHYTQKSLSLSPGK

SEQ ID NO: 669 - protein, 301 aa, synthetic construct
  REGION 1..301: note = LAG3 R97E 97-165-Fc
ERYTVLSVGPGGLRSGRLPLQPRVQLDERGRQRGDFSLWLRPARRADAGEYRAAVHLRDRALSCRLRLREPKSCDKTHTCPPCPAPELLGGPSVFLFPPKPKDTLMISRTPEVTCVVVDVSHEDPEVKFNWYVDGVEVHNAKTKPREEQYNSTYRVVSVLTVLHQDWLNGKEYKCKVSNKALPAPIEKTISKAKGQPREPQVYTLPPSRDELTKNQVSLTCLVKGFYPSDIAVEWESNGQPENNYKTTPPVLDSDGSFFLYSKLTVDKSRWQQGNVFSCSVMHEALHNHYTQKSLSLSPGK

SEQ ID NO: 670 - protein, 302 aa, synthetic construct
  REGION 1..302: note = LAG3 R97E 97-166-Fc
ERYTVLSVGPGGLRSGRLPLQPRVQLDERGRQRGDFSLWLRPARRADAGEYRAAVHLRDRALSCRLRLRLEPKSCDKTHTCPPCPAPELLGGPSVFLFPPKPKDTLMISRTPEVTCVVVDVSHEDPEVKFNWYVDGVEVHNAKTKPREEQYNSTYRVVSVLTVLHQDWLNGKEYKCKVSNKALPAPIEKTISKAKGQPREPQVYTLPPSRDELTKNQVSLTCLVKGFYPSDIAVEWESNGQPENNYKTTPPVLDSDGSFFLYSKLTVDKSRWQQGNVFSCSVMHEALHNHYTQKSLSLSPGK

SEQ ID NO: 671 - protein, 303 aa, synthetic construct
  REGION 1..303: note = LAG3 R97E 97-167-Fc
ERYTVLSVGPGGLRSGRLPLQPRVQLDERGRQRGDFSLWLRPARRADAGEYRAAVHLRDRALSCRLRLRLGEPKSCDKTHTCPPCPAPELLGGPSVFLFPPKPKDTLMISRTPEVTCVVVDVSHEDPEVKFNWYVDGVEVHNAKTKPREEQYNSTYRVVSVLTVLHQDWLNGKEYKCKVSNKALPAPIEKTISKAKGQPREPQVYTLPPSRDELTKNQVSLTCLVKGFYPSDIAVEWESNGQPENNYKTTPPVLDSDGSFFLYSKLTVDKSRWQQGNVFSCSVMHEALHNHYTQKSLSLSPGK

SEQ ID NO: 672 - protein, 361 aa, synthetic construct
  REGION 1..361: note = LAG3 28-156-Fc
EVPVVWAQEGAPAQLPCSPTIPLQDLSLLRRAGVTWQHQPDSGPPAAAPGHPLAPGPHPAAPSSWGPRPRRYTVLSVGPGGLRSGRLPLQPRVQLDERGRQRGDFSLWLRPARRADAGEYRAAVHLRDREPKSCDKTHTCPPCPAPELLGGPSVFLFPPKPKDTLMISRTPEVTCVVVDVSHEDPEVKFNWYVDGVEVHNAKTKPREEQYNSTYRVVSVLTVLHQDWLNGKEYKCKVSNKALPAPIEKTISKAKGQPREPQVYTLPPSRDELTKNQVSLTCLVKGFYPSDIAVEWESNGQPENNYKTTPPVLDSDGSFFLYSKLTVDKSRWQQGNVFSCSVMHEALHNHYTQKSLSLSPGK

SEQ ID NO: 673 - protein, 366 aa, synthetic construct
  REGION 1..366: note = LAG3 28-161-Fc
EVPVVWAQEGAPAQLPCSPTIPLQDLSLLRRAGVTWQHQPDSGPPAAAPGHPLAPGPHPAAPSSWGPRPRRYTVLSVGPGGLRSGRLPLQPRVQLDERGRQRGDFSLWLRPARRADAGEYRAAVHLRDRALSCREPKSCDKTHTCPPCPAPELLGGPSVFLFPPKPKDTLMISRTPEVTCVVVDVSHEDPEVKFNWYVDGVEVHNAKTKPREEQYNSTYRVVSVLTVLHQDWLNGKEYKCKVSNKALPAPIEKTISKAKGQPREPQVYTLPPSRDELTKNQVSLTCLVKGFYPSDIAVEWESNGQPENNYKTTPPVLDSDGSFFLYSKLTVDKSRWQQGNVFSCSVMHEALHNHYTQKSLSLSPGK

SEQ ID NO: 674 - protein, 372 aa, synthetic construct
  REGION 1..372: note = LAG3 28-167-Fc
EVPVVWAQEGAPAQLPCSPTIPLQDLSLLRRAGVTWQHQPDSGPPAAAPGHPLAPGPHPAAPSSWGPRPRRYTVLSVGPGGLRSGRLPLQPRVQLDERGRQRGDFSLWLRPARRADAGEYRAAVHLRDRALSCRLRLRLGEPKSCDKTHTCPPCPAPELLGGPSVFLFPPKPKDTLMISRTPEVTCVVVDVSHEDPEVKFNWYVDGVEVHNAKTKPREEQYNSTYRVVSVLTVLHQDWLNGKEYKCKVSNKALPAPIEKTISKAKGQPREPQVYTLPPSRDELTKNQVSLTCLVKGFYPSDIAVEWESNGQPENNYKTTPPVLDSDGSFFLYSKLTVDKSRWQQGNVFSCSVMHEALHNHYTQKSLSLSPGK

SEQ ID NO: 675 - protein, 361 aa, synthetic construct
  REGION 1..361: note = LAG3 R97E 28-156-Fc
EVPVVWAQEGAPAQLPCSPTIPLQDLSLLRRAGVTWQHQPDSGPPAAAPGHPLAPGPHPAAPSSWGPRPERYTVLSVGPGGLRSGRLPLQPRVQLDERGRQRGDFSLWLRPARRADAGEYRAAVHLRDREPKSCDKTHTCPPCPAPELLGGPSVFLFPPKPKDTLMISRTPEVTCVVVDVSHEDPEVKFNWYVDGVEVHNAKTKPREEQYNSTYRVVSVLTVLHQDWLNGKEYKCKVSNKALPAPIEKTISKAKGQPREPQVYTLPPSRDELTKNQVSLTCLVKGFYPSDIAVEWESNGQPENNYKTTPPVLDSDGSFFLYSKLTVDKSRWQQGNVFSCSVMHEALHNHYTQKSLSLSPGK

SEQ ID NO: 676 - protein, 366 aa, synthetic construct
  REGION 1..366: note = LAG3 R97E 28-161-Fc
EVPVVWAQEGAPAQLPCSPTIPLQDLSLLRRAGVTWQHQPDSGPPAAAPGHPLAPGPHPAAPSSWGPRPERYTVLSVGPGGLRSGRLPLQPRVQLDERGRQRGDFSLWLRPARRADAGEYRAAVHLRDRALSCREPKSCDKTHTCPPCPAPELLGGPSVFLFPPKPKDTLMISRTPEVTCVVVDVSHEDPEVKFNWYVDGVEVHNAKTKPREEQYNSTYRVVSVLTVLHQDWLNGKEYKCKVSNKALPAPIEKTISKAKGQPREPQVYTLPPSRDELTKNQVSLTCLVKGFYPSDIAVEWESNGQPENNYKTTPPVLDSDGSFFLYSKLTVDKSRWQQGNVFSCSVMHEALHNHYTQKSLSLSPGK

SEQ ID NO: 677 - protein, 372 aa, synthetic construct
  REGION 1..372: note = LAG3 R97E 28-167-Fc
EVPVVWAQEGAPAQLPCSPTIPLQDLSLLRRAGVTWQHQPDSGPPAAAPGHPLAPGPHPAAPSSWGPRPERYTVLSVGPGGLRSGRLPLQPRVQLDERGRQRGDFSLWLRPARRADAGEYRAAVHLRDRALSCRLRLRLGEPKSCDKTHTCPPCPAPELLGGPSVFLFPPKPKDTLMISRTPEVTCVVVDVSHEDPEVKFNWYVDGVEVHNAKTKPREEQYNSTYRVVSVLTVLHQDWLNGKEYKCKVSNKALPAPIEKTISKAKGQPREPQVYTLPPSRDELTKNQVSLTCLVKGFYPSDIAVEWESNGQPENNYKTTPPVLDSDGSFFLYSKLTVDKSRWQQGNVFSCSVMHEALHNHYTQKSLSLSPGK

SEQ ID NO: 678 - protein, 345 aa, synthetic construct
  REGION 1..345: note = LAG3 44-156-Fc
CSPTIPLQDLSLLRRAGVTWQHQPDSGPPAAAPGHPLAPGPHPAAPSSWGPRPRRYTVLSVGPGGLRSGRLPLQPRVQLDERGRQRGDFSLWLRPARRADAGEYRAAVHLRDREPKSCDKTHTCPPCPAPELLGGPSVFLFPPKPKDTLMISRTPEVTCVVVDVSHEDPEVKFNWYVDGVEVHNAKTKPREEQYNSTYRVVSVLTVLHQDWLNGKEYKCKVSNKALPAPIEKTISKAKGQPREPQVYTLPPSRDELTKNQVSLTCLVKGFYPSDIAVEWESNGQPENNYKTTPPVLDSDGSFFLYSKLTVDKSRWQQGNVFSCSVMHEALHNHYTQKSLSLSPGK

SEQ ID NO: 679 - protein, 350 aa, synthetic construct
  REGION 1..350: note = LAG3 44-161-Fc
CSPTIPLQDLSLLRRAGVTWQHQPDSGPPAAAPGHPLAPGPHPAAPSSWGPRPRRYTVLSVGPGGLRSGRLPLQPRVQLDERGRQRGDFSLWLRPARRADAGEYRAAVHLRDRALSCREPKSCDKTHTCPPCPAPELLGGPSVFLFPPKPKDTLMISRTPEVTCVVVDVSHEDPEVKFNWYVDGVEVHNAKTKPREEQYNSTYRVVSVLTVLHQDWLNGKEYKCKVSNKALPAPIEKTISKAKGQPREPQVYTLPPSRDELTKNQVSLTCLVKGFYPSDIAVEWESNGQPENNYKTTPPVLDSDGSFFLYSKLTVDKSRWQQGNVFSCSVMHEALHNHYTQKSLSLSPGK

SEQ ID NO: 680 - protein, 356 aa, synthetic construct
  REGION 1..356: note = LAG3 44-167-Fc
CSPTIPLQDLSLLRRAGVTWQHQPDSGPPAAAPGHPLAPGPHPAAPSSWGPRPRRYTVLSVGPGGLRSGRLPLQPRVQLDERGRQRGDFSLWLRPARRADAGEYRAAVHLRDRALSCRLRLRLGEPKSCDKTHTCPPCPAPELLGGPSVFLFPPKPKDTLMISRTPEVTCVVVDVSHEDPEVKFNWYVDGVEVHNAKTKPREEQYNSTYRVVSVLTVLHQDWLNGKEYKCKVSNKALPAPIEKTISKAKGQPREPQVYTLPPSRDELTKNQVSLTCLVKGFYPSDIAVEWESNGQPENNYKTTPPVLDSDGSFFLYSKLTVDKSRWQQGNVFSCSVMHEALHNHYTQKSLSLSPGK

SEQ ID NO: 681 - protein, 345 aa, synthetic construct
  REGION 1..345: note = LAG3 R97E 44-156-Fc
CSPTIPLQDLSLLRRAGVTWQHQPDSGPPAAAPGHPLAPGPHPAAPSSWGPRPERYTVLSVGPGGLRSGRLPLQPRVQLDERGRQRGDFSLWLRPARRADAGEYRAAVHLRDREPKSCDKTHTCPPCPAPELLGGPSVFLFPPKPKDTLMISRTPEVTCVVVDVSHEDPEVKFNWYVDGVEVHNAKTKPREEQYNSTYRVVSVLTVLHQDWLNGKEYKCKVSNKALPAPIEKTISKAKGQPREPQVYTLPPSRDELTKNQVSLTCLVKGFYPSDIAVEWESNGQPENNYKTTPPVLDSDGSFFLYSKLTVDKSRWQQGNVFSCSVMHEALHNHYTQKSLSLSPGK

SEQ ID NO: 682 - protein, 350 aa, synthetic construct
  REGION 1..350: note = LAG3 R97E 44-161-Fc
CSPTIPLQDLSLLRRAGVTWQHQPDSGPPAAAPGHPLAPGPHPAAPSSWGPRPERYTVLSVGPGGLRSGRLPLQPRVQLDERGRQRGDFSLWLRPARRADAGEYRAAVHLRDRALSCREPKSCDKTHTCPPCPAPELLGGPSVFLFPPKPKDTLMISRTPEVTCVVVDVSHEDPEVKFNWYVDGVEVHNAKTKPREEQYNSTYRVVSVLTVLHQDWLNGKEYKCKVSNKALPAPIEKTISKAKGQPREPQVYTLPPSRDELTKNQVSLTCLVKGFYPSDIAVEWESNGQPENNYKTTPPVLDSDGSFFLYSKLTVDKSRWQQGNVFSCSVMHEALHNHYTQKSLSLSPGK

SEQ ID NO: 683 - protein, 356 aa, synthetic construct
  REGION 1..356: note = LAG3 R97E 44-167-Fc
CSPTIPLQDLSLLRRAGVTWQHQPDSGPPAAAPGHPLAPGPHPAAPSSWGPRPERYTVLSVGPGGLRSGRLPLQPRVQLDERGRQRGDFSLWLRPARRADAGEYRAAVHLRDRALSCRLRLRLGEPKSCDKTHTCPPCPAPELLGGPSVFLFPPKPKDTLMISRTPEVTCVVVDVSHEDPEVKFNWYVDGVEVHNAKTKPREEQYNSTYRVVSVLTVLHQDWLNGKEYKCKVSNKALPAPIEKTISKAKGQPREPQVYTLPPSRDELTKNQVSLTCLVKGFYPSDIAVEWESNGQPENNYKTTPPVLDSDGSFFLYSKLTVDKSRWQQGNVFSCSVMHEALHNHYTQKSLSLSPGK

SEQ ID NO: 684 - protein, 329 aa, synthetic construct
  REGION 1..329: note = LAG3 60-156-Fc
GVTWQHQPDSGPPAAAPGHPLAPGPHPAAPSSWGPRPRRYTVLSVGPGGLRSGRLPLQPRVQLDERGRQRGDFSLWLRPARRADAGEYRAAVHLRDREPKSCDKTHTCPPCPAPELLGGPSVFLFPPKPKDTLMISRTPEVTCVVVDVSHEDPEVKFNWYVDGVEVHNAKTKPREEQYNSTYRVVSVLTVLHQDWLNGKEYKCKVSNKALPAPIEKTISKAKGQPREPQVYTLPPSRDELTKNQVSLTCLVKGFYPSDIAVEWESNGQPENNYKTTPPVLDSDGSFFLYSKLTVDKSRWQQGNVFSCSVMHEALHNHYTQKSLSLSPGK

SEQ ID NO: 685 - protein, 334 aa, synthetic construct
  REGION 1..334: note = LAG3 60-161-Fc
GVTWQHQPDSGPPAAAPGHPLAPGPHPAAPSSWGPRPRRYTVLSVGPGGLRSGRLPLQPRVQLDERGRQRGDFSLWLRPARRADAGEYRAAVHLRDRALSCREPKSCDKTHTCPPCPAPELLGGPSVFLFPPKPKDTLMISRTPEVTCVVVDVSHEDPEVKFNWYVDGVEVHNAKTKPREEQYNSTYRVVSVLTVLHQDWLNGKEYKCKVSNKALPAPIEKTISKAKGQPREPQVYTLPPSRDELTKNQVSLTCLVKGFYPSDIAVEWESNGQPENNYKTTPPVLDSDGSFFLYSKLTVDKSRWQQGNVFSCSVMHEALHNHYTQKSLSLSPGK

SEQ ID NO: 686 - protein, 340 aa, synthetic construct
  REGION 1..340: note = LAG3 60-167-Fc
GVTWQHQPDSGPPAAAPGHPLAPGPHPAAPSSWGPRPRRYTVLSVGPGGLRSGRLPLQPRVQLDERGRQRGDFSLWLRPARRADAGEYRAAVHLRDRALSCRLRLRLGEPKSCDKTHTCPPCPAPELLGGPSVFLFPPKPKDTLMISRTPEVTCVVVDVSHEDPEVKFNWYVDGVEVHNAKTKPREEQYNSTYRVVSVLTVLHQDWLNGKEYKCKVSNKALPAPIEKTISKAKGQPREPQVYTLPPSRDELTKNQVSLTCLVKGFYPSDIAVEWESNGQPENNYKTTPPVLDSDGSFFLYSKLTVDKSRWQQGNVFSCSVMHEALHNHYTQKSLSLSPGK

SEQ ID NO: 687 - protein, 329 aa, synthetic construct
  REGION 1..329: note = LAG3 R97E 60-156-Fc
GVTWQHQPDSGPPAAAPGHPLAPGPHPAAPSSWGPRPERYTVLSVGPGGLRSGRLPLQPRVQLDERGRQRGDFSLWLRPARRADAGEYRAAVHLRDREPKSCDKTHTCPPCPAPELLGGPSVFLFPPKPKDTLMISRTPEVTCVVVDVSHEDPEVKFNWYVDGVEVHNAKTKPREEQYNSTYRVVSVLTVLHQDWLNGKEYKCKVSNKALPAPIEKTISKAKGQPREPQVYTLPPSRDELTKNQVSLTCLVKGFYPSDIAVEWESNGQPENNYKTTPPVLDSDGSFFLYSKLTVDKSRWQQGNVFSCSVMHEALHNHYTQKSLSLSPGK

SEQ ID NO: 688 - protein, 334 aa, synthetic construct
  REGION 1..334: note = LAG3 R97E 60-161-Fc
GVTWQHQPDSGPPAAAPGHPLAPGPHPAAPSSWGPRPERYTVLSVGPGGLRSGRLPLQPRVQLDERGRQRGDFSLWLRPARRADAGEYRAAVHLRDRALSCREPKSCDKTHTCPPCPAPELLGGPSVFLFPPKPKDTLMISRTPEVTCVVVDVSHEDPEVKFNWYVDGVEVHNAKTKPREEQYNSTYRVVSVLTVLHQDWLNGKEYKCKVSNKALPAPIEKTISKAKGQPREPQVYTLPPSRDELTKNQVSLTCLVKGFYPSDIAVEWESNGQPENNYKTTPPVLDSDGSFFLYSKLTVDKSRWQQGNVFSCSVMHEALHNHYTQKSLSLSPGK

SEQ ID NO: 689 - protein, 340 aa, synthetic construct
  REGION 1..340: note = LAG3 R97E 60-167-Fc
GVTWQHQPDSGPPAAAPGHPLAPGPHPAAPSSWGPRPERYTVLSVGPGGLRSGRLPLQPRVQLDERGRQRGDFSLWLRPARRADAGEYRAAVHLRDRALSCRLRLRLGEPKSCDKTHTCPPCPAPELLGGPSVFLFPPKPKDTLMISRTPEVTCVVVDVSHEDPEVKFNWYVDGVEVHNAKTKPREEQYNSTYRVVSVLTVLHQDWLNGKEYKCKVSNKALPAPIEKTISKAKGQPREPQVYTLPPSRDELTKNQVSLTCLVKGFYPSDIAVEWESNGQPENNYKTTPPVLDSDGSFFLYSKLTVDKSRWQQGNVFSCSVMHEALHNHYTQKSLSLSPGK

SEQ ID NO: 690 - protein, 321 aa, synthetic construct
  REGION 1..321: note = LAG3 68-156-Fc
DSGPPAAAPGHPLAPGPHPAAPSSWGPRPRRYTVLSVGPGGLRSGRLPLQPRVQLDERGRQRGDFSLWLRPARRADAGEYRAAVHLRDREPKSCDKTHTCPPCPAPELLGGPSVFLFPPKPKDTLMISRTPEVTCVVVDVSHEDPEVKFNWYVDGVEVHNAKTKPREEQYNSTYRVVSVLTVLHQDWLNGKEYKCKVSNKALPAPIEKTISKAKGQPREPQVYTLPPSRDELTKNQVSLTCLVKGFYPSDIAVEWESNGQPENNYKTTPPVLDSDGSFFLYSKLTVDKSRWQQGNVFSCSVMHEALHNHYTQKSLSLSPGK

SEQ ID NO: 691 - protein, 326 aa, synthetic construct
  REGION 1..326: note = LAG3 68-161-Fc
DSGPPAAAPGHPLAPGPHPAAPSSWGPRPRRYTVLSVGPGGLRSGRLPLQPRVQLDERGRQRGDFSLWLRPARRADAGEYRAAVHLRDRALSCREPKSCDKTHTCPPCPAPELLGGPSVFLFPPKPKDTLMISRTPEVTCVVVDVSHEDPEVKFNWYVDGVEVHNAKTKPREEQYNSTYRVVSVLTVLHQDWLNGKEYKCKVSNKALPAPIEKTISKAKGQPREPQVYTLPPSRDELTKNQVSLTCLVKGFYPSDIAVEWESNGQPENNYKTTPPVLDSDGSFFLYSKLTVDKSRWQQGNVFSCSVMHEALHNHYTQKSLSLSPGK

SEQ ID NO: 692 - protein, 332 aa, synthetic construct
  REGION 1..332: note = LAG3 68-167-Fc
DSGPPAAAPGHPLAPGPHPAAPSSWGPRPRRYTVLSVGPGGLRSGRLPLQPRVQLDERGRQRGDFSLWLRPARRADAGEYRAAVHLRDRALSCRLRLRLGEPKSCDKTHTCPPCPAPELLGGPSVFLFPPKPKDTLMISRTPEVTCVVVDVSHEDPEVKFNWYVDGVEVHNAKTKPREEQYNSTYRVVSVLTVLHQDWLNGKEYKCKVSNKALPAPIEKTISKAKGQPREPQVYTLPPSRDELTKNQVSLTCLVKGFYPSDIAVEWESNGQPENNYKTTPPVLDSDGSFFLYSKLTVDKSRWQQGNVFSCSVMHEALHNHYTQKSLSLSPGK

SEQ ID NO: 693 - protein, 321 aa, synthetic construct
  REGION 1..321: note = LAG3 R97E 68-156-Fc
DSGPPAAAPGHPLAPGPHPAAPSSWGPRPERYTVLSVGPGGLRSGRLPLQPRVQLDERGRQRGDFSLWLRPARRADAGEYRAAVHLRDREPKSCDKTHTCPPCPAPELLGGPSVFLFPPKPKDTLMISRTPEVTCVVVDVSHEDPEVKFNWYVDGVEVHNAKTKPREEQYNSTYRVVSVLTVLHQDWLNGKEYKCKVSNKALPAPIEKTISKAKGQPREPQVYTLPPSRDELTKNQVSLTCLVKGFYPSDIAVEWESNGQPENNYKTTPPVLDSDGSFFLYSKLTVDKSRWQQGNVFSCSVMHEALHNHYTQKSLSLSPGK

SEQ ID NO: 694 - protein, 326 aa, synthetic construct
  REGION 1..326: note = LAG3 R97E 68-161-Fc
DSGPPAAAPGHPLAPGPHPAAPSSWGPRPERYTVLSVGPGGLRSGRLPLQPRVQLDERGRQRGDFSLWLRPARRADAGEYRAAVHLRDRALSCREPKSCDKTHTCPPCPAPELLGGPSVFLFPPKPKDTLMISRTPEVTCVVVDVSHEDPEVKFNWYVDGVEVHNAKTKPREEQYNSTYRVVSVLTVLHQDWLNGKEYKCKVSNKALPAPIEKTISKAKGQPREPQVYTLPPSRDELTKNQVSLTCLVKGFYPSDIAVEWESNGQPENNYKTTPPVLDSDGSFFLYSKLTVDKSRWQQGNVFSCSVMHEALHNHYTQKSLSLSPGK

SEQ ID NO: 695 - protein, 332 aa, synthetic construct
  REGION 1..332: note = LAG3 R97E 68-167-Fc
DSGPPAAAPGHPLAPGPHPAAPSSWGPRPERYTVLSVGPGGLRSGRLPLQPRVQLDERGRQRGDFSLWLRPARRADAGEYRAAVHLRDRALSCRLRLRLGEPKSCDKTHTCPPCPAPELLGGPSVFLFPPKPKDTLMISRTPEVTCVVVDVSHEDPEVKFNWYVDGVEVHNAKTKPREEQYNSTYRVVSVLTVLHQDWLNGKEYKCKVSNKALPAPIEKTISKAKGQPREPQVYTLPPSRDELTKNQVSLTCLVKGFYPSDIAVEWESNGQPENNYKTTPPVLDSDGSFFLYSKLTVDKSRWQQGNVFSCSVMHEALHNHYTQKSLSLSPGK

SEQ ID NO: 696 - protein, 306 aa, synthetic construct
  REGION 1..306: note = LAG3 83-156-Fc
GPHPAAPSSWGPRPRRYTVLSVGPGGLRSGRLPLQPRVQLDERGRQRGDFSLWLRPARRADAGEYRAAVHLRDREPKSCDKTHTCPPCPAPELLGGPSVFLFPPKPKDTLMISRTPEVTCVVVDVSHEDPEVKFNWYVDGVEVHNAKTKPREEQYNSTYRVVSVLTVLHQDWLNGKEYKCKVSNKALPAPIEKTISKAKGQPREPQVYTLPPSRDELTKNQVSLTCLVKGFYPSDIAVEWESNGQPENNYKTTPPVLDSDGSFFLYSKLTVDKSRWQQGNVFSCSVMHEALHNHYTQKSLSLSPGK

SEQ ID NO: 697 - protein, 311 aa, synthetic construct
  REGION 1..311: note = LAG3 83-161-Fc
GPHPAAPSSWGPRPRRYTVLSVGPGGLRSGRLPLQPRVQLDERGRQRGDFSLWLRPARRADAGEYRAAVHLRDRALSCREPKSCDKTHTCPPCPAPELLGGPSVFLFPPKPKDTLMISRTPEVTCVVVDVSHEDPEVKFNWYVDGVEVHNAKTKPREEQYNSTYRVVSVLTVLHQDWLNGKEYKCKVSNKALPAPIEKTISKAKGQPREPQVYTLPPSRDELTKNQVSLTCLVKGFYPSDIAVEWESNGQPENNYKTTPPVLDSDGSFFLYSKLTVDKSRWQQGNVFSCSVMHEALHNHYTQKSLSLSPGK

SEQ ID NO: 698 - protein, 317 aa, synthetic construct
  REGION 1..317: note = LAG3 83-167-Fc
GPHPAAPSSWGPRPRRYTVLSVGPGGLRSGRLPLQPRVQLDERGRQRGDFSLWLRPARRADAGEYRAAVHLRDRALSCRLRLRLGEPKSCDKTHTCPPCPAPELLGGPSVFLFPPKPKDTLMISRTPEVTCVVVDVSHEDPEVKFNWYVDGVEVHNAKTKPREEQYNSTYRVVSVLTVLHQDWLNGKEYKCKVSNKALPAPIEKTISKAKGQPREPQVYTLPPSRDELTKNQVSLTCLVKGFYPSDIAVEWESNGQPENNYKTTPPVLDSDGSFFLYSKLTVDKSRWQQGNVFSCSVMHEALHNHYTQKSLSLSPGK

SEQ ID NO: 699 - protein, 306 aa, synthetic construct
  REGION 1..306: note = LAG3 R97E 83-156-Fc
GPHPAAPSSWGPRPERYTVLSVGPGGLRSGRLPLQPRVQLDERGRQRGDFSLWLRPARRADAGEYRAAVHLRDREPKSCDKTHTCPPCPAPELLGGPSVFLFPPKPKDTLMISRTPEVTCVVVDVSHEDPEVKFNWYVDGVEVHNAKTKPREEQYNSTYRVVSVLTVLHQDWLNGKEYKCKVSNKALPAPIEKTISKAKGQPREPQVYTLPPSRDELTKNQVSLTCLVKGFYPSDIAVEWESNGQPENNYKTTPPVLDSDGSFFLYSKLTVDKSRWQQGNVFSCSVMHEALHNHYTQKSLSLSPGK

SEQ ID NO: 700 - protein, 311 aa, synthetic construct
  REGION 1..311: note = LAG3 R97E 83-161-Fc
GPHPAAPSSWGPRPERYTVLSVGPGGLRSGRLPLQPRVQLDERGRQRGDFSLWLRPARRADAGEYRAAVHLRDRALSCREPKSCDKTHTCPPCPAPELLGGPSVFLFPPKPKDTLMISRTPEVTCVVVDVSHEDPEVKFNWYVDGVEVHNAKTKPREEQYNSTYRVVSVLTVLHQDWLNGKEYKCKVSNKALPAPIEKTISKAKGQPREPQVYTLPPSRDELTKNQVSLTCLVKGFYPSDIAVEWESNGQPENNYKTTPPVLDSDGSFFLYSKLTVDKSRWQQGNVFSCSVMHEALHNHYTQKSLSLSPGK

SEQ ID NO: 701 - protein, 317 aa, synthetic construct
  REGION 1..317: note = LAG3 R97E 83-167-Fc
GPHPAAPSSWGPRPERYTVLSVGPGGLRSGRLPLQPRVQLDERGRQRGDFSLWLRPARRADAGEYRAAVHLRDRALSCRLRLRLGEPKSCDKTHTCPPCPAPELLGGPSVFLFPPKPKDTLMISRTPEVTCVVVDVSHEDPEVKFNWYVDGVEVHNAKTKPREEQYNSTYRVVSVLTVLHQDWLNGKEYKCKVSNKALPAPIEKTISKAKGQPREPQVYTLPPSRDELTKNQVSLTCLVKGFYPSDIAVEWESNGQPENNYKTTPPVLDSDGSFFLYSKLTVDKSRWQQGNVFSCSVMHEALHNHYTQKSLSLSPGK

SEQ ID NO: 702 - protein, 295 aa, synthetic construct
  REGION 1..295: note = LAG3 94-156-Fc
PRPRRYTVLSVGPGGLRSGRLPLQPRVQLDERGRQRGDFSLWLRPARRADAGEYRAAVHLRDREPKSCDKTHTCPPCPAPELLGGPSVFLFPPKPKDTLMISRTPEVTCVVVDVSHEDPEVKFNWYVDGVEVHNAKTKPREEQYNSTYRVVSVLTVLHQDWLNGKEYKCKVSNKALPAPIEKTISKAKGQPREPQVYTLPPSRDELTKNQVSLTCLVKGFYPSDIAVEWESNGQPENNYKTTPPVLDSDGSFFLYSKLTVDKSRWQQGNVFSCSVMHEALHNHYTQKSLSLSPGK

SEQ ID NO: 703 - protein, 300 aa, synthetic construct
  REGION 1..300: note = LAG3 94-161-Fc
PRPRRYTVLSVGPGGLRSGRLPLQPRVQLDERGRQRGDFSLWLRPARRADAGEYRAAVHLRDRALSCREPKSCDKTHTCPPCPAPELLGGPSVFLFPPKPKDTLMISRTPEVTCVVVDVSHEDPEVKFNWYVDGVEVHNAKTKPREEQYNSTYRVVSVLTVLHQDWLNGKEYKCKVSNKALPAPIEKTISKAKGQPREPQVYTLPPSRDELTKNQVSLTCLVKGFYPSDIAVEWESNGQPENNYKTTPPVLDSDGSFFLYSKLTVDKSRWQQGNVFSCSVMHEALHNHYTQKSLSLSPGK

SEQ ID NO: 704 - protein, 306 aa, synthetic construct
  REGION 1..306: note = LAG3 94-167-Fc
PRPRRYTVLSVGPGGLRSGRLPLQPRVQLDERGRQRGDFSLWLRPARRADAGEYRAAVHLRDRALSCRLRLRLGEPKSCDKTHTCPPCPAPELLGGPSVFLFPPKPKDTLMISRTPEVTCVVVDVSHEDPEVKFNWYVDGVEVHNAKTKPREEQYNSTYRVVSVLTVLHQDWLNGKEYKCKVSNKALPAPIEKTISKAKGQPREPQVYTLPPSRDELTKNQVSLTCLVKGFYPSDIAVEWESNGQPENNYKTTPPVLDSDGSFFLYSKLTVDKSRWQQGNVFSCSVMHEALHNHYTQKSLSLSPGK

SEQ ID NO: 705 - protein, 295 aa, synthetic construct
  REGION 1..295: note = LAG3 R97E 94-156-Fc
PRPERYTVLSVGPGGLRSGRLPLQPRVQLDERGRQRGDFSLWLRPARRADAGEYRAAVHLRDREPKSCDKTHTCPPCPAPELLGGPSVFLFPPKPKDTLMISRTPEVTCVVVDVSHEDPEVKFNWYVDGVEVHNAKTKPREEQYNSTYRVVSVLTVLHQDWLNGKEYKCKVSNKALPAPIEKTISKAKGQPREPQVYTLPPSRDELTKNQVSLTCLVKGFYPSDIAVEWESNGQPENNYKTTPPVLDSDGSFFLYSKLTVDKSRWQQGNVFSCSVMHEALHNHYTQKSLSLSPGK

SEQ ID NO: 706 - protein, 300 aa, synthetic construct
  REGION 1..300: note = LAG3 R97E 94-161-Fc
PRPERYTVLSVGPGGLRSGRLPLQPRVQLDERGRQRGDFSLWLRPARRADAGEYRAAVHLRDRALSCREPKSCDKTHTCPPCPAPELLGGPSVFLFPPKPKDTLMISRTPEVTCVVVDVSHEDPEVKFNWYVDGVEVHNAKTKPREEQYNSTYRVVSVLTVLHQDWLNGKEYKCKVSNKALPAPIEKTISKAKGQPREPQVYTLPPSRDELTKNQVSLTCLVKGFYPSDIAVEWESNGQPENNYKTTPPVLDSDGSFFLYSKLTVDKSRWQQGNVFSCSVMHEALHNHYTQKSLSLSPGK

SEQ ID NO: 707 - protein, 306 aa, synthetic construct
  REGION 1..306: note = LAG3 R97E 94-167-Fc
PRPERYTVLSVGPGGLRSGRLPLQPRVQLDERGRQRGDFSLWLRPARRADAGEYRAAVHLRDRALSCRLRLRLGEPKSCDKTHTCPPCPAPELLGGPSVFLFPPKPKDTLMISRTPEVTCVVVDVSHEDPEVKFNWYVDGVEVHNAKTKPREEQYNSTYRVVSVLTVLHQDWLNGKEYKCKVSNKALPAPIEKTISKAKGQPREPQVYTLPPSRDELTKNQVSLTCLVKGFYPSDIAVEWESNGQPENNYKTTPPVLDSDGSFFLYSKLTVDKSRWQQGNVFSCSVMHEALHNHYTQKSLSLSPGK

SEQ ID NO: 708 - protein, 287 aa, synthetic construct
  REGION 1..287: note = LAG3 102-156-Fc
LSVGPGGLRSGRLPLQPRVQLDERGRQRGDFSLWLRPARRADAGEYRAAVHLRDREPKSCDKTHTCPPCPAPELLGGPSVFLFPPKPKDTLMISRTPEVTCVVVDVSHEDPEVKFNWYVDGVEVHNAKTKPREEQYNSTYRVVSVLTVLHQDWLNGKEYKCKVSNKALPAPIEKTISKAKGQPREPQVYTLPPSRDELTKNQVSLTCLVKGFYPSDIAVEWESNGQPENNYKTTPPVLDSDGSFFLYSKLTVDKSRWQQGNVFSCSVMHEALHNHYTQKSLSLSPGK

SEQ ID NO: 709 - protein, 292 aa, synthetic construct
  REGION 1..292: note = LAG3 102-161-Fc
LSVGPGGLRSGRLPLQPRVQLDERGRQRGDFSLWLRPARRADAGEYRAAVHLRDRALSCREPKSCDKTHTCPPCPAPELLGGPSVFLFPPKPKDTLMISRTPEVTCVVVDVSHEDPEVKFNWYVDGVEVHNAKTKPREEQYNSTYRVVSVLTVLHQDWLNGKEYKCKVSNKALPAPIEKTISKAKGQPREPQVYTLPPSRDELTKNQVSLTCLVKGFYPSDIAVEWESNGQPENNYKTTPPVLDSDGSFFLYSKLTVDKSRWQQGNVFSCSVMHEALHNHYTQKSLSLSPGK

SEQ ID NO: 710 - protein, 298 aa, synthetic construct
  REGION 1..298: note = LAG3 102-167-Fc
LSVGPGGLRSGRLPLQPRVQLDERGRQRGDFSLWLRPARRADAGEYRAAVHLRDRALSCRLRLRLGEPKSCDKTHTCPPCPAPELLGGPSVFLFPPKPKDTLMISRTPEVTCVVVDVSHEDPEVKFNWYVDGVEVHNAKTKPREEQYNSTYRVVSVLTVLHQDWLNGKEYKCKVSNKALPAPIEKTISKAKGQPREPQVYTLPPSRDELTKNQVSLTCLVKGFYPSDIAVEWESNGQPENNYKTTPPVLDSDGSFFLYSKLTVDKSRWQQGNVFSCSVMHEALHNHYTQKSLSLSPGK

SEQ ID NO: 711 - protein, 282 aa, synthetic construct
  REGION 1..282: note = LAG3 107-156-Fc
GGLRSGRLPLQPRVQLDERGRQRGDFSLWLRPARRADAGEYRAAVHLRDREPKSCDKTHTCPPCPAPELLGGPSVFLFPPKPKDTLMISRTPEVTCVVVDVSHEDPEVKFNWYVDGVEVHNAKTKPREEQYNSTYRVVSVLTVLHQDWLNGKEYKCKVSNKALPAPIEKTISKAKGQPREPQVYTLPPSRDELTKNQVSLTCLVKGFYPSDIAVEWESNGQPENNYKTTPPVLDSDGSFFLYSKLTVDKSRWQQGNVFSCSVMHEALHNHYTQKSLSLSPGK

SEQ ID NO: 712 - protein, 287 aa, synthetic construct
  REGION 1..287: note = LAG3 107-161-Fc
GGLRSGRLPLQPRVQLDERGRQRGDFSLWLRPARRADAGEYRAAVHLRDRALSCREPKSCDKTHTCPPCPAPELLGGPSVFLFPPKPKDTLMISRTPEVTCVVVDVSHEDPEVKFNWYVDGVEVHNAKTKPREEQYNSTYRVVSVLTVLHQDWLNGKEYKCKVSNKALPAPIEKTISKAKGQPREPQVYTLPPSRDELTKNQVSLTCLVKGFYPSDIAVEWESNGQPENNYKTTPPVLDSDGSFFLYSKLTVDKSRWQQGNVFSCSVMHEALHNHYTQKSLSLSPGK

SEQ ID NO: 713 - protein, 293 aa, synthetic construct
  REGION 1..293: note = LAG3 107-167-Fc
GGLRSGRLPLQPRVQLDERGRQRGDFSLWLRPARRADAGEYRAAVHLRDRALSCRLRLRLGEPKSCDKTHTCPPCPAPELLGGPSVFLFPPKPKDTLMISRTPEVTCVVVDVSHEDPEVKFNWYVDGVEVHNAKTKPREEQYNSTYRVVSVLTVLHQDWLNGKEYKCKVSNKALPAPIEKTISKAKGQPREPQVYTLPPSRDELTKNQVSLTCLVKGFYPSDIAVEWESNGQPENNYKTTPPVLDSDGSFFLYSKLTVDKSRWQQGNVFSCSVMHEALHNHYTQKSLSLSPGK

SEQ ID NO: 714 - protein, 277 aa, synthetic construct
  REGION 1..277: note = LAG3 112-156-Fc
GRLPLQPRVQLDERGRQRGDFSLWLRPARRADAGEYRAAVHLRDREPKSCDKTHTCPPCPAPELLGGPSVFLFPPKPKDTLMISRTPEVTCVVVDVSHEDPEVKFNWYVDGVEVHNAKTKPREEQYNSTYRVVSVLTVLHQDWLNGKEYKCKVSNKALPAPIEKTISKAKGQPREPQVYTLPPSRDELTKNQVSLTCLVKGFYPSDIAVEWESNGQPENNYKTTPPVLDSDGSFFLYSKLTVDKSRWQQGNVFSCSVMHEALHNHYTQKSLSLSPGK

SEQ ID NO: 715 - protein, 282 aa, synthetic construct
  REGION 1..282: note = LAG3 112-161-Fc
GRLPLQPRVQLDERGRQRGDFSLWLRPARRADAGEYRAAVHLRDRALSCREPKSCDKTHTCPPCPAPELLGGPSVFLFPPKPKDTLMISRTPEVTCVVVDVSHEDPEVKFNWYVDGVEVHNAKTKPREEQYNSTYRVVSVLTVLHQDWLNGKEYKCKVSNKALPAPIEKTISKAKGQPREPQVYTLPPSRDELTKNQVSLTCLVKGFYPSDIAVEWESNGQPENNYKTTPPVLDSDGSFFLYSKLTVDKSRWQQGNVFSCSVMHEALHNHYTQKSLSLSPGK

SEQ ID NO: 716 - protein, 288 aa, synthetic construct
  REGION 1..288: note = LAG3 112-167-Fc
GRLPLQPRVQLDERGRQRGDFSLWLRPARRADAGEYRAAVHLRDRALSCRLRLRLGEPKSCDKTHTCPPCPAPELLGGPSVFLFPPKPKDTLMISRTPEVTCVVVDVSHEDPEVKFNWYVDGVEVHNAKTKPREEQYNSTYRVVSVLTVLHQDWLNGKEYKCKVSNKALPAPIEKTISKAKGQPREPQVYTLPPSRDELTKNQVSLTCLVKGFYPSDIAVEWESNGQPENNYKTTPPVLDSDGSFFLYSKLTVDKSRWQQGNVFSCSVMHEALHNHYTQKSLSLSPGK

SEQ ID NO: 717 - protein, 272 aa, synthetic construct
  REGION 1..272: note = LAG3 117-156-Fc
QPRVQLDERGRQRGDFSLWLRPARRADAGEYRAAVHLRDREPKSCDKTHTCPPCPAPELLGGPSVFLFPPKPKDTLMISRTPEVTCVVVDVSHEDPEVKFNWYVDGVEVHNAKTKPREEQYNSTYRVVSVLTVLHQDWLNGKEYKCKVSNKALPAPIEKTISKAKGQPREPQVYTLPPSRDELTKNQVSLTCLVKGFYPSDIAVEWESNGQPENNYKTTPPVLDSDGSFFLYSKLTVDKSRWQQGNVFSCSVMHEALHNHYTQKSLSLSPGK

SEQ ID NO: 718 - protein, 277 aa, synthetic construct
  REGION 1..277: note = LAG3 117-161-Fc
QPRVQLDERGRQRGDFSLWLRPARRADAGEYRAAVHLRDRALSCREPKSCDKTHTCPPCPAPELLGGPSVFLFPPKPKDTLMISRTPEVTCVVVDVSHEDPEVKFNWYVDGVEVHNAKTKPREEQYNSTYRVVSVLTVLHQDWLNGKEYKCKVSNKALPAPIEKTISKAKGQPREPQVYTLPPSRDELTKNQVSLTCLVKGFYPSDIAVEWESNGQPENNYKTTPPVLDSDGSFFLYSKLTVDKSRWQQGNVFSCSVMHEALHNHYTQKSLSLSPGK

SEQ ID NO: 719 - protein, 283 aa, synthetic construct
  REGION 1..283: note = LAG3 117-167-Fc
QPRVQLDERGRQRGDFSLWLRPARRADAGEYRAAVHLRDRALSCRLRLRLGEPKSCDKTHTCPPCPAPELLGGPSVFLFPPKPKDTLMISRTPEVTCVVVDVSHEDPEVKFNWYVDGVEVHNAKTKPREEQYNSTYRVVSVLTVLHQDWLNGKEYKCKVSNKALPAPIEKTISKAKGQPREPQVYTLPPSRDELTKNQVSLTCLVKGFYPSDIAVEWESNGQPENNYKTTPPVLDSDGSFFLYSKLTVDKSRWQQGNVFSCSVMHEALHNHYTQKSLSLSPGK

SEQ ID NO: 720 - protein, 267 aa, synthetic construct
  REGION 1..267: note = LAG3 122-156-Fc
LDERGRQRGDFSLWLRPARRADAGEYRAAVHLRDREPKSCDKTHTCPPCPAPELLGGPSVFLFPPKPKDTLMISRTPEVTCVVVDVSHEDPEVKFNWYVDGVEVHNAKTKPREEQYNSTYRVVSVLTVLHQDWLNGKEYKCKVSNKALPAPIEKTISKAKGQPREPQVYTLPPSRDELTKNQVSLTCLVKGFYPSDIAVEWESNGQPENNYKTTPPVLDSDGSFFLYSKLTVDKSRWQQGNVFSCSVMHEALHNHYTQKSLSLSPGK

SEQ ID NO: 721 - protein, 272 aa, synthetic construct
  REGION 1..272: note = LAG3 122-161-Fc
LDERGRQRGDFSLWLRPARRADAGEYRAAVHLRDRALSCREPKSCDKTHTCPPCPAPELLGGPSVFLFPPKPKDTLMISRTPEVTCVVVDVSHEDPEVKFNWYVDGVEVHNAKTKPREEQYNSTYRVVSVLTVLHQDWLNGKEYKCKVSNKALPAPIEKTISKAKGQPREPQVYTLPPSRDELTKNQVSLTCLVKGFYPSDIAVEWESNGQPENNYKTTPPVLDSDGSFFLYSKLTVDKSRWQQGNVFSCSVMHEALHNHYTQKSLSLSPGK

SEQ ID NO: 722 - protein, 278 aa, synthetic construct
  REGION 1..278: note = LAG3 122-167-Fc
LDERGRQRGDFSLWLRPARRADAGEYRAAVHLRDRALSCRLRLRLGEPKSCDKTHTCPPCPAPELLGGPSVFLFPPKPKDTLMISRTPEVTCVVVDVSHEDPEVKFNWYVDGVEVHNAKTKPREEQYNSTYRVVSVLTVLHQDWLNGKEYKCKVSNKALPAPIEKTISKAKGQPREPQVYTLPPSRDELTKNQVSLTCLVKGFYPSDIAVEWESNGQPENNYKTTPPVLDSDGSFFLYSKLTVDKSRWQQGNVFSCSVMHEALHNHYTQKSLSLSPGK

SEQ ID NO: 723 - protein, 262 aa, synthetic construct
  REGION 1..262: note = LAG3 127-156-Fc
RQRGDFSLWLRPARRADAGEYRAAVHLRDREPKSCDKTHTCPPCPAPELLGGPSVFLFPPKPKDTLMISRTPEVTCVVVDVSHEDPEVKFNWYVDGVEVHNAKTKPREEQYNSTYRVVSVLTVLHQDWLNGKEYKCKVSNKALPAPIEKTISKAKGQPREPQVYTLPPSRDELTKNQVSLTCLVKGFYPSDIAVEWESNGQPENNYKTTPPVLDSDGSFFLYSKLTVDKSRWQQGNVFSCSVMHEALHNHYTQKSLSLSPGK

SEQ ID NO: 724 - protein, 267 aa, synthetic construct
  REGION 1..267: note = LAG3 127-161-Fc
RQRGDFSLWLRPARRADAGEYRAAVHLRDRALSCREPKSCDKTHTCPPCPAPELLGGPSVFLFPPKPKDTLMISRTPEVTCVVVDVSHEDPEVKFNWYVDGVEVHNAKTKPREEQYNSTYRVVSVLTVLHQDWLNGKEYKCKVSNKALPAPIEKTISKAKGQPREPQVYTLPPSRDELTKNQVSLTCLVKGFYPSDIAVEWESNGQPENNYKTTPPVLDSDGSFFLYSKLTVDKSRWQQGNVFSCSVMHEALHNHYTQKSLSLSPGK

SEQ ID NO: 725 - protein, 273 aa, synthetic construct
  REGION 1..273: note = LAG3 127-167-Fc
RQRGDFSLWLRPARRADAGEYRAAVHLRDRALSCRLRLRLGEPKSCDKTHTCPPCPAPELLGGPSVFLFPPKPKDTLMISRTPEVTCVVVDVSHEDPEVKFNWYVDGVEVHNAKTKPREEQYNSTYRVVSVLTVLHQDWLNGKEYKCKVSNKALPAPIEKTISKAKGQPREPQVYTLPPSRDELTKNQVSLTCLVKGFYPSDIAVEWESNGQPENNYKTTPPVLDSDGSFFLYSKLTVDKSRWQQGNVFSCSVMHEALHNHYTQKSLSLSPGK

SEQ ID NO: 726 - protein, 257 aa, synthetic construct
  REGION 1..257: note = LAG3 132-156-Fc
FSLWLRPARRADAGEYRAAVHLRDREPKSCDKTHTCPPCPAPELLGGPSVFLFPPKPKDTLMISRTPEVTCVVVDVSHEDPEVKFNWYVDGVEVHNAKTKPREEQYNSTYRVVSVLTVLHQDWLNGKEYKCKVSNKALPAPIEKTISKAKGQPREPQVYTLPPSRDELTKNQVSLTCLVKGFYPSDIAVEWESNGQPENNYKTTPPVLDSDGSFFLYSKLTVDKSRWQQGNVFSCSVMHEALHNHYTQKSLSLSPGK

SEQ ID NO: 727 - protein, 262 aa, synthetic construct
  REGION 1..262: note = LAG3 132-161-Fc
FSLWLRPARRADAGEYRAAVHLRDRALSCREPKSCDKTHTCPPCPAPELLGGPSVFLFPPKPKDTLMISRTPEVTCVVVDVSHEDPEVKFNWYVDGVEVHNAKTKPREEQYNSTYRVVSVLTVLHQDWLNGKEYKCKVSNKALPAPIEKTISKAKGQPREPQVYTLPPSRDELTKNQVSLTCLVKGFYPSDIAVEWESNGQPENNYKTTPPVLDSDGSFFLYSKLTVDKSRWQQGNVFSCSVMHEALHNHYTQKSLSLSPGK

SEQ ID NO: 728 - protein, 268 aa, synthetic construct
  REGION 1..268: note = LAG3 132-167-Fc
FSLWLRPARRADAGEYRAAVHLRDRALSCRLRLRLGEPKSCDKTHTCPPCPAPELLGGPSVFLFPPKPKDTLMISRTPEVTCVVVDVSHEDPEVKFNWYVDGVEVHNAKTKPREEQYNSTYRVVSVLTVLHQDWLNGKEYKCKVSNKALPAPIEKTISKAKGQPREPQVYTLPPSRDELTKNQVSLTCLVKGFYPSDIAVEWESNGQPENNYKTTPPVLDSDGSFFLYSKLTVDKSRWQQGNVFSCSVMHEALHNHYTQKSLSLSPGK

SEQ ID NO: 729 - protein, 252 aa, synthetic construct
  REGION 1..252: note = LAG3 137-156-Fc
RPARRADAGEYRAAVHLRDREPKSCDKTHTCPPCPAPELLGGPSVFLFPPKPKDTLMISRTPEVTCVVVDVSHEDPEVKFNWYVDGVEVHNAKTKPREEQYNSTYRVVSVLTVLHQDWLNGKEYKCKVSNKALPAPIEKTISKAKGQPREPQVYTLPPSRDELTKNQVSLTCLVKGFYPSDIAVEWESNGQPENNYKTTPPVLDSDGSFFLYSKLTVDKSRWQQGNVFSCSVMHEALHNHYTQKSLSLSPGK

SEQ ID NO: 730 - protein, 257 aa, synthetic construct
  REGION 1..257: note = LAG3 137-161-Fc
RPARRADAGEYRAAVHLRDRALSCREPKSCDKTHTCPPCPAPELLGGPSVFLFPPKPKDTLMISRTPEVTCVVVDVSHEDPEVKFNWYVDGVEVHNAKTKPREEQYNSTYRVVSVLTVLHQDWLNGKEYKCKVSNKALPAPIEKTISKAKGQPREPQVYTLPPSRDELTKNQVSLTCLVKGFYPSDIAVEWESNGQPENNYKTTPPVLDSDGSFFLYSKLTVDKSRWQQGNVFSCSVMHEALHNHYTQKSLSLSPGK

SEQ ID NO: 731 - protein, 263 aa, synthetic construct
  REGION 1..263: note = LAG3 137-167-Fc
RPARRADAGEYRAAVHLRDRALSCRLRLRLGEPKSCDKTHTCPPCPAPELLGGPSVFLFPPKPKDTLMISRTPEVTCVVVDVSHEDPEVKFNWYVDGVEVHNAKTKPREEQYNSTYRVVSVLTVLHQDWLNGKEYKCKVSNKALPAPIEKTISKAKGQPREPQVYTLPPSRDELTKNQVSLTCLVKGFYPSDIAVEWESNGQPENNYKTTPPVLDSDGSFFLYSKLTVDKSRWQQGNVFSCSVMHEALHNHYTQKSLSLSPGK

SEQ ID NO: 732 - protein, 332 aa, synthetic construct
  REGION 1..332: note = LAG3 23-122-Fc
LQPGAEVPVVWAQEGAPAQLPCSPTIPLQDLSLLRRAGVTWQHQPDSGPPAAAPGHPLAPGPHPAAPSSWGPRPRRYTVLSVGPGGLRSGRLPLQPRVQLEPKSCDKTHTCPPCPAPELLGGPSVFLFPPKPKDTLMISRTPEVTCVVVDVSHEDPEVKFNWYVDGVEVHNAKTKPREEQYNSTYRVVSVLTVLHQDWLNGKEYKCKVSNKALPAPIEKTISKAKGQPREPQVYTLPPSRDELTKNQVSLTCLVKGFYPSDIAVEWESNGQPENNYKTTPPVLDSDGSFFLYSKLTVDKSRWQQGNVFSCSVMHEALHNHYTQKSLSLSPGK

SEQ ID NO: 733 - protein, 339 aa, synthetic construct
  REGION 1..339: note = LAG3 23-129-Fc
LQPGAEVPVVWAQEGAPAQLPCSPTIPLQDLSLLRRAGVTWQHQPDSGPPAAAPGHPLAPGPHPAAPSSWGPRPRRYTVLSVGPGGLRSGRLPLQPRVQLDERGRQREPKSCDKTHTCPPCPAPELLGGPSVFLFPPKPKDTLMISRTPEVTCVVVDVSHEDPEVKFNWYVDGVEVHNAKTKPREEQYNSTYRVVSVLTVLHQDWLNGKEYKCKVSNKALPAPIEKTISKAKGQPREPQVYTLPPSRDELTKNQVSLTCLVKGFYPSDIAVEWESNGQPENNYKTTPPVLDSDGSFFLYSKLTVDKSRWQQGNVFSCSVMHEALHNHYTQKSLSLSPGK

SEQ ID NO: 734 - protein, 345 aa, synthetic construct
  REGION 1..345: note = LAG3 23-136-Fc
LQPGAEVPVVWAQEGAPAQLPCSPTIPLQDLSLLRRAGVTWQHQPDSGPPAAAPGHPLAPGPHPAAPSSWGPRPRRYTVLSVGPGGLRSGRLPLQPRVQLDERGRQRGDFSLWEPKSCDKTHTCPPCPAPELLGGPSVFLFPPKPKDTLMISRTPEVTCVVVDVSHEDPEVKFNWYVDGVEVHNAKTKPREEQYNSTYRVVSVLTVLHQDWLNGKEYKCKVSNKALPAPIEKTISKAKGQPREPQVYTLPPSRDELTKNQVSLTCLVKGFYPSDIAVEWESNGQPENNYKTTPPVLDSDGSFFLYSKLTVDKSRWQQGNVFSCSVMHEALHNHYTQKSLSLSPGK

SEQ ID NO: 735 - protein, 356 aa, synthetic construct
  REGION 1..356: note = LAG3 23-146-Fc
LQPGAEVPVVWAQEGAPAQLPCSPTIPLQDLSLLRRAGVTWQHQPDSGPPAAAPGHPLAPGPHPAAPSSWGPRPRRYTVLSVGPGGLRSGRLPLQPRVQLDERGRQRGDFSLWLRPARRADAGEEPKSCDKTHTCPPCPAPELLGGPSVFLFPPKPKDTLMISRTPEVTCVVVDVSHEDPEVKFNWYVDGVEVHNAKTKPREEQYNSTYRVVSVLTVLHQDWLNGKEYKCKVSNKALPAPIEKTISKAKGQPREPQVYTLPPSRDELTKNQVSLTCLVKGFYPSDIAVEWESNGQPENNYKTTPPVLDSDGSFFLYSKLTVDKSRWQQGNVFSCSVMHEALHNHYTQKSLSLSPGK

SEQ ID NO: 736 - protein, 366 aa, synthetic construct
  REGION 1..366: note = LAG3 23-156-Fc
LQPGAEVPVVWAQEGAPAQLPCSPTIPLQDLSLLRRAGVTWQHQPDSGPPAAAPGHPLAPGPHPAAPSSWGPRPRRYTVLSVGPGGLRSGRLPLQPRVQLDERGRQRGDFSLWLRPARRADAGEYRAAVHLRDREPKSCDKTHTCPPCPAPELLGGPSVFLFPPKPKDTLMISRTPEVTCVVVDVSHEDPEVKFNWYVDGVEVHNAKTKPREEQYNSTYRVVSVLTVLHQDWLNGKEYKCKVSNKALPAPIEKTISKAKGQPREPQVYTLPPSRDELTKNQVSLTCLVKGFYPSDIAVEWESNGQPENNYKTTPPVLDSDGSFFLYSKLTVDKSRWQQGNVFSCSVMHEALHNHYTQKSLSLSPGK

SEQ ID NO: 737 - protein, 371 aa, synthetic construct
  REGION 1..371: note = LAG3 23-161-Fc
LQPGAEVPVVWAQEGAPAQLPCSPTIPLQDLSLLRRAGVTWQHQPDSGPPAAAPGHPLAPGPHPAAPSSWGPRPRRYTVLSVGPGGLRSGRLPLQPRVQLDERGRQRGDFSLWLRPARRADAGEYRAAVHLRDRALSCREPKSCDKTHTCPPCPAPELLGGPSVFLFPPKPKDTLMISRTPEVTCVVVDVSHEDPEVKFNWYVDGVEVHNAKTKPREEQYNSTYRVVSVLTVLHQDWLNGKEYKCKVSNKALPAPIEKTISKAKGQPREPQVYTLPPSRDELTKNQVSLTCLVKGFYPSDIAVEWESNGQPENNYKTTPPVLDSDGSFFLYSKLTVDKSRWQQGNVFSCSVMHEALHNHYTQKSLSLSPGK

SEQ ID NO: 738 - protein, 377 aa, synthetic construct
  REGION 1..377: note = LAG3 23-167-Fc
LQPGAEVPVVWAQEGAPAQLPCSPTIPLQDLSLLRRAGVTWQHQPDSGPPAAAPGHPLAPGPHPAAPSSWGPRPRRYTVLSVGPGGLRSGRLPLQPRVQLDERGRQRGDFSLWLRPARRADAGEYRAAVHLRDRALSCRLRLRLGEPKSCDKTHTCPPCPAPELLGGPSVFLFPPKPKDTLMISRTPEVTCVVVDVSHEDPEVKFNWYVDGVEVHNAKTKPREEQYNSTYRVVSVLTVLHQDWLNGKEYKCKVSNKALPAPIEKTISKAKGQPREPQVYTLPPSRDELTKNQVSLTCLVKGFYPSDIAVEWESNGQPENNYKTTPPVLDSDGSFFLYSKLTVDKSRWQQGNVFSCSVMHEALHNHYTQKSLSLSPGK

SEQ ID NO: 739 - protein, 332 aa, synthetic construct
  REGION 1..332: note = LAG3 R97E 23-122-Fc
LQPGAEVPVVWAQEGAPAQLPCSPTIPLQDLSLLRRAGVTWQHQPDSGPPAAAPGHPLAPGPHPAAPSSWGPRPERYTVLSVGPGGLRSGRLPLQPRVQLEPKSCDKTHTCPPCPAPELLGGPSVFLFPPKPKDTLMISRTPEVTCVVVDVSHEDPEVKFNWYVDGVEVHNAKTKPREEQYNSTYRVVSVLTVLHQDWLNGKEYKCKVSNKALPAPIEKTISKAKGQPREPQVYTLPPSRDELTKNQVSLTCLVKGFYPSDIAVEWESNGQPENNYKTTPPVLDSDGSFFLYSKLTVDKSRWQQGNVFSCSVMHEALHNHYTQKSLSLSPGK

SEQ ID NO: 740 - protein, 339 aa, synthetic construct
  REGION 1..339: note = LAG3 R97E 23-129-Fc
LQPGAEVPVVWAQEGAPAQLPCSPTIPLQDLSLLRRAGVTWQHQPDSGPPAAAPGHPLAPGPHPAAPSSWGPRPERYTVLSVGPGGLRSGRLPLQPRVQLDERGRQREPKSCDKTHTCPPCPAPELLGGPSVFLFPPKPKDTLMISRTPEVTCVVVDVSHEDPEVKFNWYVDGVEVHNAKTKPREEQYNSTYRVVSVLTVLHQDWLNGKEYKCKVSNKALPAPIEKTISKAKGQPREPQVYTLPPSRDELTKNQVSLTCLVKGFYPSDIAVEWESNGQPENNYKTTPPVLDSDGSFFLYSKLTVDKSRWQQGNVFSCSVMHEALHNHYTQKSLSLSPGK

SEQ ID NO: 741 - protein, 345 aa, synthetic construct
  REGION 1..345: note = LAG3 R97E 23-136-Fc
LQPGAEVPVVWAQEGAPAQLPCSPTIPLQDLSLLRRAGVTWQHQPDSGPPAAAPGHPLAPGPHPAAPSSWGPRPERYTVLSVGPGGLRSGRLPLQPRVQLDERGRQRGDFSLWEPKSCDKTHTCPPCPAPELLGGPSVFLFPPKPKDTLMISRTPEVTCVVVDVSHEDPEVKFNWYVDGVEVHNAKTKPREEQYNSTYRVVSVLTVLHQDWLNGKEYKCKVSNKALPAPIEKTISKAKGQPREPQVYTLPPSRDELTKNQVSLTCLVKGFYPSDIAVEWESNGQPENNYKTTPPVLDSDGSFFLYSKLTVDKSRWQQGNVFSCSVMHEALHNHYTQKSLSLSPGK

SEQ ID NO: 742 - protein, 356 aa, synthetic construct
  REGION 1..356: note = LAG3 R97E 23-146-Fc
LQPGAEVPVVWAQEGAPAQLPCSPTIPLQDLSLLRRAGVTWQHQPDSGPPAAAPGHPLAPGPHPAAPSSWGPRPERYTVLSVGPGGLRSGRLPLQPRVQLDERGRQRGDFSLWLRPARRADAGEEPKSCDKTHTCPPCPAPELLGGPSVFLFPPKPKDTLMISRTPEVTCVVVDVSHEDPEVKFNWYVDGVEVHNAKTKPREEQYNSTYRVVSVLTVLHQDWLNGKEYKCKVSNKALPAPIEKTISKAKGQPREPQVYTLPPSRDELTKNQVSLTCLVKGFYPSDIAVEWESNGQPENNYKTTPPVLDSDGSFFLYSKLTVDKSRWQQGNVFSCSVMHEALHNHYTQKSLSLSPGK

SEQ ID NO: 743 - protein, 366 aa, synthetic construct
  REGION 1..366: note = LAG3 R97E 23-156-Fc
LQPGAEVPVVWAQEGAPAQLPCSPTIPLQDLSLLRRAGVTWQHQPDSGPPAAAPGHPLAPGPHPAAPSSWGPRPERYTVLSVGPGGLRSGRLPLQPRVQLDERGRQRGDFSLWLRPARRADAGEYRAAVHLRDREPKSCDKTHTCPPCPAPELLGGPSVFLFPPKPKDTLMISRTPEVTCVVVDVSHEDPEVKFNWYVDGVEVHNAKTKPREEQYNSTYRVVSVLTVLHQDWLNGKEYKCKVSNKALPAPIEKTISKAKGQPREPQVYTLPPSRDELTKNQVSLTCLVKGFYPSDIAVEWESNGQPENNYKTTPPVLDSDGSFFLYSKLTVDKSRWQQGNVFSCSVMHEALHNHYTQKSLSLSPGK

SEQ ID NO: 744 - protein, 371 aa, synthetic construct
  REGION 1..371: note = LAG3 R97E 23-161-Fc
LQPGAEVPVVWAQEGAPAQLPCSPTIPLQDLSLLRRAGVTWQHQPDSGPPAAAPGHPLAPGPHPAAPSSWGPRPERYTVLSVGPGGLRSGRLPLQPRVQLDERGRQRGDFSLWLRPARRADAGEYRAAVHLRDRALSCREPKSCDKTHTCPPCPAPELLGGPSVFLFPPKPKDTLMISRTPEVTCVVVDVSHEDPEVKFNWYVDGVEVHNAKTKPREEQYNSTYRVVSVLTVLHQDWLNGKEYKCKVSNKALPAPIEKTISKAKGQPREPQVYTLPPSRDELTKNQVSLTCLVKGFYPSDIAVEWESNGQPENNYKTTPPVLDSDGSFFLYSKLTVDKSRWQQGNVFSCSVMHEALHNHYTQKSLSLSPGK

SEQ ID NO: 745 - protein, 377 aa, synthetic construct
  REGION 1..377: note = LAG3 R97E 23-167-Fc
LQPGAEVPVVWAQEGAPAQLPCSPTIPLQDLSLLRRAGVTWQHQPDSGPPAAAPGHPLAPGPHPAAPSSWGPRPERYTVLSVGPGGLRSGRLPLQPRVQLDERGRQRGDFSLWLRPARRADAGEYRAAVHLRDRALSCRLRLRLGEPKSCDKTHTCPPCPAPELLGGPSVFLFPPKPKDTLMISRTPEVTCVVVDVSHEDPEVKFNWYVDGVEVHNAKTKPREEQYNSTYRVVSVLTVLHQDWLNGKEYKCKVSNKALPAPIEKTISKAKGQPREPQVYTLPPSRDELTKNQVSLTCLVKGFYPSDIAVEWESNGQPENNYKTTPPVLDSDGSFFLYSKLTVDKSRWQQGNVFSCSVMHEALHNHYTQKSLSLSPGK

SEQ ID NO: 746 - protein, 660 aa, synthetic construct
  REGION 1..660: note = LAG3-Fc
LQPGAEVPVVWAQEGAPAQLPCSPTIPLQDLSLLRRAGVTWQHQPDSGPPAAAPGHPLAPGPHPAAPSSWGPRPRRYTVLSVGPGGLRSGRLPLQPRVQLDERGRQRGDFSLWLRPARRADAGEYRAAVHLRDRALSCRLRLRLGQASMTASPPGSLRASDWVILNCSFSRPDRPASVHWFRNRGQGRVPVRESPHHHLAESFLFLPQVSPMDSGPWGCILTYRDGFNVSIMYNLTVLGLEPPTPLTVYAGAGSRVGLPCRLPAGVGTRSFLTAKWTPPGGGPDLLVTGDNGDFTLRLEDVSQAQAGTYTCHIHLQEQQLNATVTLAIITVTPKSFGSPGSLGKLLCEVTPVSGQERFVWSSLDTPSQRSFSGPWLEAQEAQLLSQPWQCQLYQGERLLGAAVYFTELSSPGAQRSGRAPGALPAGHLEPKSCDKTHTCPPCPAPELLGGPSVFLFPPKPKDTLMISRTPEVTCVVVDVSHEDPEVKFNWYVDGVEVHNAKTKPREEQYNSTYRVVSVLTVLHQDWLNGKEYKCKVSNKALPAPIEKTISKAKGQPREPQVYTLPPSRDELTKNQVSLTCLVKGFYPSDIAVEWESNGQPENNYKTTPPVLDSDGSFFLYSKLTVDKSRWQQGNVFSCSVMHEALHNHYTQKSLSLSPGK

SEQ ID NO: 747 - protein, 529 aa, synthetic construct
  REGION 1..529: note = hLAG3 R97E 97-156-sugemalimab heavy chain
ERYTVLSVGPGGLRSGRLPLQPRVQLDERGRQRGDFSLWLRPARRADAGEYRAAVHLRDRGGGGSGGGGSGGGGSGGGGSGEVQLLESGGGLVQPGGSLRLSCAASGFTFSSYAMSWVRQAPGKGLEWVSGISGSGGFTYYADSVKGRFTISRDNSKNTLYLQMNSLRAEDTAVYYCAKPPRGYNYGPFDYWGQGTLVTVSSASTKGPSVFPLAPCSRSTSESTAALGCLVKDYFPEPVTVSWNSGALTSGVHTFPAVLQSSGLYSLSSVVTVPSSSLGTKTYTCNVDHKPSNTKVDKRVESKYGPPCPPCPAPEFLGGPSVFLFPPKPKDTLMISRTPEVTCVVVDVSQEDPEVQFNWYVDGVEVHNAKTKPREEQFNSTYRVVSVLTVLHQDWLNGKEYKCKVSNKGLPSSIEKTISKAKGQPREPQVYTLPPSQEEMTKNQVSLTCLVKGFYPSDIAVEWESNGQPENNYKTTPPVLDSDGSFFLYSRLTVDKSRWQEGNVFSCSVMHEALHNHYTQKSLSLSLGK

SEQ ID NO: 748 - protein, 514 aa, synthetic construct
  REGION 1..514: note = hLAG3 112-156-sugemalimab heavy chain
GRLPLQPRVQLDERGRQRGDFSLWLRPARRADAGEYRAAVHLRDRGGGGSGGGGSGGGGSGGGGSGEVQLLESGGGLVQPGGSLRLSCAASGFTFSSYAMSWVRQAPGKGLEWVSGISGSGGFTYYADSVKGRFTISRDNSKNTLYLQMNSLRAEDTAVYYCAKPPRGYNYGPFDYWGQGTLVTVSSASTKGPSVFPLAPCSRSTSESTAALGCLVKDYFPEPVTVSWNSGALTSGVHTFPAVLQSSGLYSLSSVVTVPSSSLGTKTYTCNVDHKPSNTKVDKRVESKYGPPCPPCPAPEFLGGPSVFLFPPKPKDTLMISRTPEVTCVVVDVSQEDPEVQFNWYVDGVEVHNAKTKPREEQFNSTYRVVSVLTVLHQDWLNGKEYKCKVSNKGLPSSIEKTISKAKGQPREPQVYTLPPSQEEMTKNQVSLTCLVKGFYPSDIAVEWESNGQPENNYKTTPPVLDSDGSFFLYSRLTVDKSRWQEGNVFSCSVMHEALHNHYTQKSLSLSLGK

SEQ ID NO: 749 - protein, 504 aa, synthetic construct
  REGION 1..504: note = hLAG3 122-156-sugemalimab heavy chain
LDERGRQRGDFSLWLRPARRADAGEYRAAVHLRDRGGGGSGGGGSGGGGSGGGGSGEVQLLESGGGLVQPGGSLRLSCAASGFTFSSYAMSWVRQAPGKGLEWVSGISGSGGFTYYADSVKGRFTISRDNSKNTLYLQMNSLRAEDTAVYYCAKPPRGYNYGPFDYWGQGTLVTVSSASTKGPSVFPLAPCSRSTSESTAALGCLVKDYFPEPVTVSWNSGALTSGVHTFPAVLQSSGLYSLSSVVTVPSSSLGTKTYTCNVDHKPSNTKVDKRVESKYGPPCPPCPAPEFLGGPSVFLFPPKPKDTLMISRTPEVTCVVVDVSQEDPEVQFNWYVDGVEVHNAKTKPREEQFNSTYRVVSVLTVLHQDWLNGKEYKCKVSNKGLPSSIEKTISKAKGQPREPQVYTLPPSQEEMTKNQVSLTCLVKGFYPSDIAVEWESNGQPENNYKTTPPVLDSDGSFFLYSRLTVDKSRWQEGNVFSCSVMHEALHNHYTQKSLSLSLGK

SEQ ID NO: 750 - protein, 534 aa, synthetic construct
  REGION 1..534: note = hLAG3 R97E 97-161-sugemalimab heavy chain
ERYTVLSVGPGGLRSGRLPLQPRVQLDERGRQRGDFSLWLRPARRADAGEYRAAVHLRDRALSCRGGGGSGGGGSGGGGSGGGGSGEVQLLESGGGLVQPGGSLRLSCAASGFTFSSYAMSWVRQAPGKGLEWVSGISGSGGFTYYADSVKGRFTISRDNSKNTLYLQMNSLRAEDTAVYYCAKPPRGYNYGPFDYWGQGTLVTVSSASTKGPSVFPLAPCSRSTSESTAALGCLVKDYFPEPVTVSWNSGALTSGVHTFPAVLQSSGLYSLSSVVTVPSSSLGTKTYTCNVDHKPSNTKVDKRVESKYGPPCPPCPAPEFLGGPSVFLFPPKPKDTLMISRTPEVTCVVVDVSQEDPEVQFNWYVDGVEVHNAKTKPREEQFNSTYRVVSVLTVLHQDWLNGKEYKCKVSNKGLPSSIEKTISKAKGQPREPQVYTLPPSQEEMTKNQVSLTCLVKGFYPSDIAVEWESNGQPENNYKTTPPVLDSDGSFFLYSRLTVDKSRWQEGNVFSCSVMHEALHNHYTQKSLSLSLGK

SEQ ID NO: 751 - protein, 660 aa, synthetic construct
  REGION 1..660: note = hLAG3 R97E 97-156-sugemalimab heavy chain -CD86 IgV
ERYTVLSVGPGGLRSGRLPLQPRVQLDERGRQRGDFSLWLRPARRADAGEYRAAVHLRDRGGGGGSGGGGSGGGGSGGGGSGEVQLLESGGGLVQPGGSLRLSCAASGFTFSSYAMSWVRQAPGKGLEWVSGISGSGGFTYYADSVKGRFTISRDNSKNTLYLQMNSLRAEDTAVYYCAKPPRGYNYGPFDYWGQGTLVTVSSASTKGPSVFPLAPCSRSTSESTAALGCLVKDYFPEPVTVSWNSGALTSGVHTFPAVLQSSGLYSLSSVVTVPSSSLGTKTYTCNVDHKPSNTKVDKRVESKYGPPCPPCPAPEFLGGPSVFLFPPKPKDTLMISRTPEVTCVVVDVSQEDPEVQFNWYVDGVEVHNAKTKPREEQFNSTYRVVSVLTVLHQDWLNGKEYKCKVSNKGLPSSIEKTISKAKGQPREPQVYTLPPSQEEMTKNQVSLTCLVKGFYPSDIAVEWESNGQPENNYKTTPPVLDSDGSFFLYSRLTVDKSRWQEGNVFSCSVMHEALHNHYTQKSLSLSLGAGGGGGSGGGGSGGGGSGGGGAPLKIQAYFNETADLPCQFANSQNQSLSELVVFWQDQENLVLNEVYLGKEKFDSVHSKYMGRTSFDSDSWTLRLHNLQIKDKGLYQCIIHHKKPTGMIRIHQMNSELSVL

SEQ ID NO: 752 - protein, 665 aa, synthetic construct
  REGION 1..665: note = hLAG3 R97E 97-161-sugemalimab heavy chain -CD86 IgV
ERYTVLSVGPGGLRSGRLPLQPRVQLDERGRQRGDFSLWLRPARRADAGEYRAAVHLRDRALSCRGGGGGSGGGGSGGGGSGGGGSGEVQLLESGGGLVQPGGSLRLSCAASGFTFSSYAMSWVRQAPGKGLEWVSGISGSGGFTYYADSVKGRFTISRDNSKNTLYLQMNSLRAEDTAVYYCAKPPRGYNYGPFDYWGQGTLVTVSSASTKGPSVFPLAPCSRSTSESTAALGCLVKDYFPEPVTVSWNSGALTSGVHTFPAVLQSSGLYSLSSVVTVPSSSLGTKTYTCNVDHKPSNTKVDKRVESKYGPPCPPCPAPEFLGGPSVFLFPPKPKDTLMISRTPEVTCVVVDVSQEDPEVQFNWYVDGVEVHNAKTKPREEQFNSTYRVVSVLTVLHQDWLNGKEYKCKVSNKGLPSSIEKTISKAKGQPREPQVYTLPPSQEEMTKNQVSLTCLVKGFYPSDIAVEWESNGQPENNYKTTPPVLDSDGSFFLYSRLTVDKSRWQEGNVFSCSVMHEALHNHYTQKSLSLSLGAGGGGGSGGGGSGGGGSGGGGAPLKIQAYFNETADLPCQFANSQNQSLSELVVFWQDQENLVLNEVYLGKEKFDSVHSKYMGRTSFDSDSWTLRLHNLQIKDKGLYQCIIHHKKPTGMIRIHQMNSELSVL

SEQ ID NO: 753 - protein, 774 aa, synthetic construct
  REGION 1..774: note = LAG3 97-156-sugemalimab antibody heavy chain -CD86 ECD-Q25I/F33L/H90I
RRYTVLSVGPGGLRSGRLPLQPRVQLDERGRQRGDFSLWLRPARRADAGEYRAAVHLRDRGGGGSGGGGSGGGGSGGGGSGEVQLLESGGGLVQPGGSLRLSCAASGFTFSSYAMSWVRQAPGKGLEWVSGISGSGGFTYYADSVKGRFTISRDNSKNTLYLQMNSLRAEDTAVYYCAKPPRGYNYGPFDYWGQGTLVTVSSASTKGPSVFPLAPCSRSTSESTAALGCLVKDYFPEPVTVSWNSGALTSGVHTFPAVLQSSGLYSLSSVVTVPSSSLGTKTYTCNVDHKPSNTKVDKRVESKYGPPCPPCPAPEFLGGPSVFLFPPKPKDTLMISRTPEVTCVVVDVSQEDPEVQFNWYVDGVEVHNAKTKPREEQFNSTYRVVSVLTVLHQDWLNGKEYKCKVSNKGLPSSIEKTISKAKGQPREPQVYTLPPSQEEMTKNQVSLTCLVKGFYPSDIAVEWESNGQPENNYKTTPPVLDSDGSFFLYSRLTVDKSRWQEGNVFSCSVMHEALHNHYTQKSLSLSLGAGGGGSGGGGSGGGGSGGGGSGAPLKIQAYFNETADLPCQFANSQNISLSELVVLWQDQENLVLNEVYLGKEKFDSVHSKYMGRTSFDSDSWTLRLHNLQIKDKGLYQCIIIHKKPTGMIRIHQMNSELSVLANFSQPEIVPISNITENVYINLTCSSIHGYPEPKKMSVLLRTKNSTIEYDGVMQKSQDNVTELYDVSISLSVSFPDVTSNMTIFCILETDKTRLLSSPFSIELEDPQPPPDHIP

SEQ ID NO: 754 - protein, 774 aa, synthetic construct
  REGION 1..774: note = LAG3 97-156-sugemalimab antibody heavy chain -CD86-ECD-Q25V/F33L/H90I
RRYTVLSVGPGGLRSGRLPLQPRVQLDERGRQRGDFSLWLRPARRADAGEYRAAVHLRDRGGGGSGGGGSGGGGSGGGGSGEVQLLESGGGLVQPGGSLRLSCAASGFTFSSYAMSWVRQAPGKGLEWVSGISGSGGFTYYADSVKGRFTISRDNSKNTLYLQMNSLRAEDTAVYYCAKPPRGYNYGPFDYWGQGTLVTVSSASTKGPSVFPLAPCSRSTSESTAALGCLVKDYFPEPVTVSWNSGALTSGVHTFPAVLQSSGLYSLSSVVTVPSSSLGTKTYTCNVDHKPSNTKVDKRVESKYGPPCPPCPAPEFLGGPSVFLFPPKPKDTLMISRTPEVTCVVVDVSQEDPEVQFNWYVDGVEVHNAKTKPREEQFNSTYRVVSVLTVLHQDWLNGKEYKCKVSNKGLPSSIEKTISKAKGQPREPQVYTLPPSQEEMTKNQVSLTCLVKGFYPSDIAVEWESNGQPENNYKTTPPVLDSDGSFFLYSRLTVDKSRWQEGNVFSCSVMHEALHNHYTQKSLSLSLGAGGGGSGGGGSGGGGSGGGGSGAPLKIQAYFNETADLPCQFANSQNVSLSELVVLWQDQENLVLNEVYLGKEKFDSVHSKYMGRTSFDSDSWTLRLHNLQIKDKGLYQCIIIHKKPTGMIRIHQMNSELSVLANFSQPEIVPISNITENVYINLTCSSIHGYPEPKKMSVLLRTKNSTIEYDGVMQKSQDNVTELYDVSISLSVSFPDVTSNMTIFCILETDKTRLLSSPFSIELEDPQPPPDHIP

SEQ ID NO: 755 - protein, 774 aa, synthetic construct
  REGION 1..774: note = LAG3 97-156-sugemalimab antibody heavy chain -CD86 ECD-Q25I/F33V/H90I
RRYTVLSVGPGGLRSGRLPLQPRVQLDERGRQRGDFSLWLRPARRADAGEYRAAVHLRDRGGGGSGGGGSGGGGSGGGGSGEVQLLESGGGLVQPGGSLRLSCAASGFTFSSYAMSWVRQAPGKGLEWVSGISGSGGFTYYADSVKGRFTISRDNSKNTLYLQMNSLRAEDTAVYYCAKPPRGYNYGPFDYWGQGTLVTVSSASTKGPSVFPLAPCSRSTSESTAALGCLVKDYFPEPVTVSWNSGALTSGVHTFPAVLQSSGLYSLSSVVTVPSSSLGTKTYTCNVDHKPSNTKVDKRVESKYGPPCPPCPAPEFLGGPSVFLFPPKPKDTLMISRTPEVTCVVVDVSQEDPEVQFNWYVDGVEVHNAKTKPREEQFNSTYRVVSVLTVLHQDWLNGKEYKCKVSNKGLPSSIEKTISKAKGQPREPQVYTLPPSQEEMTKNQVSLTCLVKGFYPSDIAVEWESNGQPENNYKTTPPVLDSDGSFFLYSRLTVDKSRWQEGNVFSCSVMHEALHNHYTQKSLSLSLGAGGGGSGGGGSGGGGSGGGGSGAPLKIQAYFNETADLPCQFANSQNISLSELVVVWQDQENLVLNEVYLGKEKFDSVHSKYMGRTSFDSDSWTLRLHNLQIKDKGLYQCIIIHKKPTGMIRIHQMNSELSVLANFSQPEIVPISNITENVYINLTCSSIHGYPEPKKMSVLLRTKNSTIEYDGVMQKSQDNVTELYDVSISLSVSFPDVTSNMTIFCILETDKTRLLSSPFSIELEDPQPPPDHIP

SEQ ID NO: 756 - protein, 774 aa, synthetic construct
  REGION 1..774: note = LAG3 97-156-sugemalimab antibody heavy chain -CD86 ECD-Q25V/F33V/H90I
RRYTVLSVGPGGLRSGRLPLQPRVQLDERGRQRGDFSLWLRPARRADAGEYRAAVHLRDRGGGGSGGGGSGGGGSGGGGSGEVQLLESGGGLVQPGGSLRLSCAASGFTFSSYAMSWVRQAPGKGLEWVSGISGSGGFTYYADSVKGRFTISRDNSKNTLYLQMNSLRAEDTAVYYCAKPPRGYNYGPFDYWGQGTLVTVSSASTKGPSVFPLAPCSRSTSESTAALGCLVKDYFPEPVTVSWNSGALTSGVHTFPAVLQSSGLYSLSSVVTVPSSSLGTKTYTCNVDHKPSNTKVDKRVESKYGPPCPPCPAPEFLGGPSVFLFPPKPKDTLMISRTPEVTCVVVDVSQEDPEVQFNWYVDGVEVHNAKTKPREEQFNSTYRVVSVLTVLHQDWLNGKEYKCKVSNKGLPSSIEKTISKAKGQPREPQVYTLPPSQEEMTKNQVSLTCLVKGFYPSDIAVEWESNGQPENNYKTTPPVLDSDGSFFLYSRLTVDKSRWQEGNVFSCSVMHEALHNHYTQKSLSLSLGAGGGGSGGGGSGGGGSGGGGSGAPLKIQAYFNETADLPCQFANSQNVSLSELVVVWQDQENLVLNEVYLGKEKFDSVHSKYMGRTSFDSDSWTLRLHNLQIKDKGLYQCIIIHKKPTGMIRIHQMNSELSVLANFSQPEIVPISNITENVYINLTCSSIHGYPEPKKMSVLLRTKNSTIEYDGVMQKSQDNVTELYDVSISLSVSFPDVTSNMTIFCILETDKTRLLSSPFSIELEDPQPPPDHIP

SEQ ID NO: 757 - protein, 774 aa, synthetic construct
  REGION 1..774: note = LAG3 97-156-sugemalimab antibody heavy chain -CD86 ECD-Q25I/F33L/H90V
RRYTVLSVGPGGLRSGRLPLQPRVQLDERGRQRGDFSLWLRPARRADAGEYRAAVHLRDRGGGGSGGGGSGGGGSGGGGSGEVQLLESGGGLVQPGGSLRLSCAASGFTFSSYAMSWVRQAPGKGLEWVSGISGSGGFTYYADSVKGRFTISRDNSKNTLYLQMNSLRAEDTAVYYCAKPPRGYNYGPFDYWGQGTLVTVSSASTKGPSVFPLAPCSRSTSESTAALGCLVKDYFPEPVTVSWNSGALTSGVHTFPAVLQSSGLYSLSSVVTVPSSSLGTKTYTCNVDHKPSNTKVDKRVESKYGPPCPPCPAPEFLGGPSVFLFPPKPKDTLMISRTPEVTCVVVDVSQEDPEVQFNWYVDGVEVHNAKTKPREEQFNSTYRVVSVLTVLHQDWLNGKEYKCKVSNKGLPSSIEKTISKAKGQPREPQVYTLPPSQEEMTKNQVSLTCLVKGFYPSDIAVEWESNGQPENNYKTTPPVLDSDGSFFLYSRLTVDKSRWQEGNVFSCSVMHEALHNHYTQKSLSLSLGAGGGGSGGGGSGGGGSGGGGSGAPLKIQAYFNETADLPCQFANSQNISLSELVVLWQDQENLVLNEVYLGKEKFDSVHSKYMGRTSFDSDSWTLRLHNLQIKDKGLYQCIIVHKKPTGMIRIHQMNSELSVLANFSQPEIVPISNITENVYINLTCSSIHGYPEPKKMSVLLRTKNSTIEYDGVMQKSQDNVTELYDVSISLSVSFPDVTSNMTIFCILETDKTRLLSSPFSIELEDPQPPPDHIP

SEQ ID NO: 758 - protein, 774 aa, synthetic construct
  REGION 1..774: note = LAG3 97-156-sugemalimab antibody heavy chain -CD86 ECD-Q25V/F33L/H90V
RRYTVLSVGPGGLRSGRLPLQPRVQLDERGRQRGDFSLWLRPARRADAGEYRAAVHLRDRGGGGSGGGGSGGGGSGGGGSGEVQLLESGGGLVQPGGSLRLSCAASGFTFSSYAMSWVRQAPGKGLEWVSGISGSGGFTYYADSVKGRFTISRDNSKNTLYLQMNSLRAEDTAVYYCAKPPRGYNYGPFDYWGQGTLVTVSSASTKGPSVFPLAPCSRSTSESTAALGCLVKDYFPEPVTVSWNSGALTSGVHTFPAVLQSSGLYSLSSVVTVPSSSLGTKTYTCNVDHKPSNTKVDKRVESKYGPPCPPCPAPEFLGGPSVFLFPPKPKDTLMISRTPEVTCVVVDVSQEDPEVQFNWYVDGVEVHNAKTKPREEQFNSTYRVVSVLTVLHQDWLNGKEYKCKVSNKGLPSSIEKTISKAKGQPREPQVYTLPPSQEEMTKNQVSLTCLVKGFYPSDIAVEWESNGQPENNYKTTPPVLDSDGSFFLYSRLTVDKSRWQEGNVFSCSVMHEALHNHYTQKSLSLSLGAGGGGSGGGGSGGGGSGGGGSGAPLKIQAYFNETADLPCQFANSQNVSLSELVVLWQDQENLVLNEVYLGKEKFDSVHSKYMGRTSFDSDSWTLRLHNLQIKDKGLYQCIIVHKKPTGMIRIHQMNSELSVLANFSQPEIVPISNITENVYINLTCSSIHGYPEPKKMSVLLRTKNSTIEYDGVMQKSQDNVTELYDVSISLSVSFPDVTSNMTIFCILETDKTRLLSSPFSIELEDPQPPPDHIP

SEQ ID NO: 759 - protein, 774 aa, synthetic construct
  REGION 1..774: note = LAG3 97-156-sugemalimab antibody heavy chain -CD86 ECD-Q25I/F33V/H90V
RRYTVLSVGPGGLRSGRLPLQPRVQLDERGRQRGDFSLWLRPARRADAGEYRAAVHLRDRGGGGSGGGGSGGGGSGGGGSGEVQLLESGGGLVQPGGSLRLSCAASGFTFSSYAMSWVRQAPGKGLEWVSGISGSGGFTYYADSVKGRFTISRDNSKNTLYLQMNSLRAEDTAVYYCAKPPRGYNYGPFDYWGQGTLVTVSSASTKGPSVFPLAPCSRSTSESTAALGCLVKDYFPEPVTVSWNSGALTSGVHTFPAVLQSSGLYSLSSVVTVPSSSLGTKTYTCNVDHKPSNTKVDKRVESKYGPPCPPCPAPEFLGGPSVFLFPPKPKDTLMISRTPEVTCVVVDVSQEDPEVQFNWYVDGVEVHNAKTKPREEQFNSTYRVVSVLTVLHQDWLNGKEYKCKVSNKGLPSSIEKTISKAKGQPREPQVYTLPPSQEEMTKNQVSLTCLVKGFYPSDIAVEWESNGQPENNYKTTPPVLDSDGSFFLYSRLTVDKSRWQEGNVFSCSVMHEALHNHYTQKSLSLSLGAGGGGSGGGGSGGGGSGGGGSGAPLKIQAYFNETADLPCQFANSQNISLSELVVVWQDQENLVLNEVYLGKEKFDSVHSKYMGRTSFDSDSWTLRLHNLQIKDKGLYQCIIVHKKPTGMIRIHQMNSELSVLANFSQPEIVPISNITENVYINLTCSSIHGYPEPKKMSVLLRTKNSTIEYDGVMQKSQDNVTELYDVSISLSVSFPDVTSNMTIFCILETDKTRLLSSPFSIELEDPQPPPDHIP

SEQ ID NO: 760 - protein, 774 aa, synthetic construct
  REGION 1..774: note = LAG3 97-156-sugemalimab antibody heavy chain -CD86 ECD-Q25V/F33V/H90V
RRYTVLSVGPGGLRSGRLPLQPRVQLDERGRQRGDFSLWLRPARRADAGEYRAAVHLRDRGGGGSGGGGSGGGGSGGGGSGEVQLLESGGGLVQPGGSLRLSCAASGFTFSSYAMSWVRQAPGKGLEWVSGISGSGGFTYYADSVKGRFTISRDNSKNTLYLQMNSLRAEDTAVYYCAKPPRGYNYGPFDYWGQGTLVTVSSASTKGPSVFPLAPCSRSTSESTAALGCLVKDYFPEPVTVSWNSGALTSGVHTFPAVLQSSGLYSLSSVVTVPSSSLGTKTYTCNVDHKPSNTKVDKRVESKYGPPCPPCPAPEFLGGPSVFLFPPKPKDTLMISRTPEVTCVVVDVSQEDPEVQFNWYVDGVEVHNAKTKPREEQFNSTYRVVSVLTVLHQDWLNGKEYKCKVSNKGLPSSIEKTISKAKGQPREPQVYTLPPSQEEMTKNQVSLTCLVKGFYPSDIAVEWESNGQPENNYKTTPPVLDSDGSFFLYSRLTVDKSRWQEGNVFSCSVMHEALHNHYTQKSLSLSLGAGGGGSGGGGSGGGGSGGGGSGAPLKIQAYFNETADLPCQFANSQNVSLSELVVVWQDQENLVLNEVYLGKEKFDSVHSKYMGRTSFDSDSWTLRLHNLQIKDKGLYQCIIVHKKPTGMIRIHQMNSELSVLANFSQPEIVPISNITENVYINLTCSSIHGYPEPKKMSVLLRTKNSTIEYDGVMQKSQDNVTELYDVSISLSVSFPDVTSNMTIFCILETDKTRLLSSPFSIELEDPQPPPDHIP

SEQ ID NO: 761 - protein, 774 aa, synthetic construct
  REGION 1..774: note = LAG3 97-156-sugemalimab antibody heavy chain -CD86 ECD-A13L/Q25I/F33L/H90I
RRYTVLSVGPGGLRSGRLPLQPRVQLDERGRQRGDFSLWLRPARRADAGEYRAAVHLRDRGGGGSGGGGSGGGGSGGGGSGEVQLLESGGGLVQPGGSLRLSCAASGFTFSSYAMSWVRQAPGKGLEWVSGISGSGGFTYYADSVKGRFTISRDNSKNTLYLQMNSLRAEDTAVYYCAKPPRGYNYGPFDYWGQGTLVTVSSASTKGPSVFPLAPCSRSTSESTAALGCLVKDYFPEPVTVSWNSGALTSGVHTFPAVLQSSGLYSLSSVVTVPSSSLGTKTYTCNVDHKPSNTKVDKRVESKYGPPCPPCPAPEFLGGPSVFLFPPKPKDTLMISRTPEVTCVVVDVSQEDPEVQFNWYVDGVEVHNAKTKPREEQFNSTYRVVSVLTVLHQDWLNGKEYKCKVSNKGLPSSIEKTISKAKGQPREPQVYTLPPSQEEMTKNQVSLTCLVKGFYPSDIAVEWESNGQPENNYKTTPPVLDSDGSFFLYSRLTVDKSRWQEGNVFSCSVMHEALHNHYTQKSLSLSLGAGGGGSGGGGSGGGGSGGGGSGAPLKIQAYFNETLDLPCQFANSQNISLSELVVLWQDQENLVLNEVYLGKEKFDSVHSKYMGRTSFDSDSWTLRLHNLQIKDKGLYQCIIIHKKPTGMIRIHQMNSELSVLANFSQPEIVPISNITENVYINLTCSSIHGYPEPKKMSVLLRTKNSTIEYDGVMQKSQDNVTELYDVSISLSVSFPDVTSNMTIFCILETDKTRLLSSPFSIELEDPQPPPDHIP

SEQ ID NO: 762 - protein, 774 aa, synthetic construct
  REGION 1..774: note = LAG3 97-156-sugemalimab antibody heavy chain -CD86 ECD-A13I/Q25I/F33L/H90I
RRYTVLSVGPGGLRSGRLPLQPRVQLDERGRQRGDFSLWLRPARRADAGEYRAAVHLRDRGGGGSGGGGSGGGGSGGGGSGEVQLLESGGGLVQPGGSLRLSCAASGFTFSSYAMSWVRQAPGKGLEWVSGISGSGGFTYYADSVKGRFTISRDNSKNTLYLQMNSLRAEDTAVYYCAKPPRGYNYGPFDYWGQGTLVTVSSASTKGPSVFPLAPCSRSTSESTAALGCLVKDYFPEPVTVSWNSGALTSGVHTFPAVLQSSGLYSLSSVVTVPSSSLGTKTYTCNVDHKPSNTKVDKRVESKYGPPCPPCPAPEFLGGPSVFLFPPKPKDTLMISRTPEVTCVVVDVSQEDPEVQFNWYVDGVEVHNAKTKPREEQFNSTYRVVSVLTVLHQDWLNGKEYKCKVSNKGLPSSIEKTISKAKGQPREPQVYTLPPSQEEMTKNQVSLTCLVKGFYPSDIAVEWESNGQPENNYKTTPPVLDSDGSFFLYSRLTVDKSRWQEGNVFSCSVMHEALHNHYTQKSLSLSLGAGGGGSGGGGSGGGGSGGGGSGAPLKIQAYFNETIDLPCQFANSQNISLSELVVLWQDQENLVLNEVYLGKEKFDSVHSKYMGRTSFDSDSWTLRLHNLQIKDKGLYQCIIIHKKPTGMIRIHQMNSELSVLANFSQPEIVPISNITENVYINLTCSSIHGYPEPKKMSVLLRTKNSTIEYDGVMQKSQDNVTELYDVSISLSVSFPDVTSNMTIFCILETDKTRLLSSPFSIELEDPQPPPDHIP

SEQ ID NO: 763 - protein, 774 aa, synthetic construct
  REGION 1..774: note = LAG3 97-156-sugemalimab antibody heavy chain -CD86 ECD-A13L/Q25V/F33L/H90I
RRYTVLSVGPGGLRSGRLPLQPRVQLDERGRQRGDFSLWLRPARRADAGEYRAAVHLRDRGGGGSGGGGSGGGGSGGGGSGEVQLLESGGGLVQPGGSLRLSCAASGFTFSSYAMSWVRQAPGKGLEWVSGISGSGGFTYYADSVKGRFTISRDNSKNTLYLQMNSLRAEDTAVYYCAKPPRGYNYGPFDYWGQGTLVTVSSASTKGPSVFPLAPCSRSTSESTAALGCLVKDYFPEPVTVSWNSGALTSGVHTFPAVLQSSGLYSLSSVVTVPSSSLGTKTYTCNVDHKPSNTKVDKRVESKYGPPCPPCPAPEFLGGPSVFLFPPKPKDTLMISRTPEVTCVVVDVSQEDPEVQFNWYVDGVEVHNAKTKPREEQFNSTYRVVSVLTVLHQDWLNGKEYKCKVSNKGLPSSIEKTISKAKGQPREPQVYTLPPSQEEMTKNQVSLTCLVKGFYPSDIAVEWESNGQPENNYKTTPPVLDSDGSFFLYSRLTVDKSRWQEGNVFSCSVMHEALHNHYTQKSLSLSLGAGGGGSGGGGSGGGGSGGGGSGAPLKIQAYFNETLDLPCQFANSQNVSLSELVVLWQDQENLVLNEVYLGKEKFDSVHSKYMGRTSFDSDSWTLRLHNLQIKDKGLYQCIIIHKKPTGMIRIHQMNSELSVLANFSQPEIVPISNITENVYINLTCSSIHGYPEPKKMSVLLRTKNSTIEYDGVMQKSQDNVTELYDVSISLSVSFPDVTSNMTIFCILETDKTRLLSSPFSIELEDPQPPPDHIP

SEQ ID NO: 764 - protein, 774 aa, synthetic construct
  REGION 1..774: note = LAG3 97-156-sugemalimab antibody heavy chain -CD86 ECD-A13I/Q25V/F33L/H90I
RRYTVLSVGPGGLRSGRLPLQPRVQLDERGRQRGDFSLWLRPARRADAGEYRAAVHLRDRGGGGSGGGGSGGGGSGGGGSGEVQLLESGGGLVQPGGSLRLSCAASGFTFSSYAMSWVRQAPGKGLEWVSGISGSGGFTYYADSVKGRFTISRDNSKNTLYLQMNSLRAEDTAVYYCAKPPRGYNYGPFDYWGQGTLVTVSSASTKGPSVFPLAPCSRSTSESTAALGCLVKDYFPEPVTVSWNSGALTSGVHTFPAVLQSSGLYSLSSVVTVPSSSLGTKTYTCNVDHKPSNTKVDKRVESKYGPPCPPCPAPEFLGGPSVFLFPPKPKDTLMISRTPEVTCVVVDVSQEDPEVQFNWYVDGVEVHNAKTKPREEQFNSTYRVVSVLTVLHQDWLNGKEYKCKVSNKGLPSSIEKTISKAKGQPREPQVYTLPPSQEEMTKNQVSLTCLVKGFYPSDIAVEWESNGQPENNYKTTPPVLDSDGSFFLYSRLTVDKSRWQEGNVFSCSVMHEALHNHYTQKSLSLSLGAGGGGSGGGGSGGGGSGGGGSGAPLKIQAYFNETIDLPCQFANSQNVSLSELVVLWQDQENLVLNEVYLGKEKFDSVHSKYMGRTSFDSDSWTLRLHNLQIKDKGLYQCIIIHKKPTGMIRIHQMNSELSVLANFSQPEIVPISNITENVYINLTCSSIHGYPEPKKMSVLLRTKNSTIEYDGVMQKSQDNVTELYDVSISLSVSFPDVTSNMTIFCILETDKTRLLSSPFSIELEDPQPPPDHIP

SEQ ID NO: 765 - protein, 774 aa, synthetic construct
  REGION 1..774: note = LAG3 97-156-sugemalimab antibody heavy chain -CD86 ECD-Q25I/F33L/I89L/H90I
RRYTVLSVGPGGLRSGRLPLQPRVQLDERGRQRGDFSLWLRPARRADAGEYRAAVHLRDRGGGGSGGGGSGGGGSGGGGSGEVQLLESGGGLVQPGGSLRLSCAASGFTFSSYAMSWVRQAPGKGLEWVSGISGSGGFTYYADSVKGRFTISRDNSKNTLYLQMNSLRAEDTAVYYCAKPPRGYNYGPFDYWGQGTLVTVSSASTKGPSVFPLAPCSRSTSESTAALGCLVKDYFPEPVTVSWNSGALTSGVHTFPAVLQSSGLYSLSSVVTVPSSSLGTKTYTCNVDHKPSNTKVDKRVESKYGPPCPPCPAPEFLGGPSVFLFPPKPKDTLMISRTPEVTCVVVDVSQEDPEVQFNWYVDGVEVHNAKTKPREEQFNSTYRVVSVLTVLHQDWLNGKEYKCKVSNKGLPSSIEKTISKAKGQPREPQVYTLPPSQEEMTKNQVSLTCLVKGFYPSDIAVEWESNGQPENNYKTTPPVLDSDGSFFLYSRLTVDKSRWQEGNVFSCSVMHEALHNHYTQKSLSLSLGAGGGGSGGGGSGGGGSGGGGSGAPLKIQAYFNETADLPCQFANSQNISLSELVVLWQDQENLVLNEVYLGKEKFDSVHSKYMGRTSFDSDSWTLRLHNLQIKDKGLYQCILIHKKPTGMIRIHQMNSELSVLANFSQPEIVPISNITENVYINLTCSSIHGYPEPKKMSVLLRTKNSTIEYDGVMQKSQDNVTELYDVSISLSVSFPDVTSNMTIFCILETDKTRLLSSPFSIELEDPQPPPDHIP

SEQ ID NO: 766 - protein, 774 aa, synthetic construct
  REGION 1..774: note = LAG3 97-156-sugemalimab antibody heavy chain -CD86 ECD-Q25I/F33L/M60R/H90I
RRYTVLSVGPGGLRSGRLPLQPRVQLDERGRQRGDFSLWLRPARRADAGEYRAAVHLRDRGGGGSGGGGSGGGGSGGGGSGEVQLLESGGGLVQPGGSLRLSCAASGFTFSSYAMSWVRQAPGKGLEWVSGISGSGGFTYYADSVKGRFTISRDNSKNTLYLQMNSLRAEDTAVYYCAKPPRGYNYGPFDYWGQGTLVTVSSASTKGPSVFPLAPCSRSTSESTAALGCLVKDYFPEPVTVSWNSGALTSGVHTFPAVLQSSGLYSLSSVVTVPSSSLGTKTYTCNVDHKPSNTKVDKRVESKYGPPCPPCPAPEFLGGPSVFLFPPKPKDTLMISRTPEVTCVVVDVSQEDPEVQFNWYVDGVEVHNAKTKPREEQFNSTYRVVSVLTVLHQDWLNGKEYKCKVSNKGLPSSIEKTISKAKGQPREPQVYTLPPSQEEMTKNQVSLTCLVKGFYPSDIAVEWESNGQPENNYKTTPPVLDSDGSFFLYSRLTVDKSRWQEGNVFSCSVMHEALHNHYTQKSLSLSLGAGGGGSGGGGSGGGGSGGGGSGAPLKIQAYFNETADLPCQFANSQNISLSELVVLWQDQENLVLNEVYLGKEKFDSVHSKYRGRTSFDSDSWTLRLHNLQIKDKGLYQCIIIHKKPTGMIRIHQMNSELSVLANFSQPEIVPISNITENVYINLTCSSIHGYPEPKKMSVLLRTKNSTIEYDGVMQKSQDNVTELYDVSISLSVSFPDVTSNMTIFCILETDKTRLLSSPFSIELEDPQPPPDHIP

SEQ ID NO: 767 - protein, 774 aa, synthetic construct
  REGION 1..774: note = LAG3 97-156-sugemalimab antibody heavy chain -CD86 ECD-Q25V/F33L/I89L/H90I
RRYTVLSVGPGGLRSGRLPLQPRVQLDERGRQRGDFSLWLRPARRADAGEYRAAVHLRDRGGGGSGGGGSGGGGSGGGGSGEVQLLESGGGLVQPGGSLRLSCAASGFTFSSYAMSWVRQAPGKGLEWVSGISGSGGFTYYADSVKGRFTISRDNSKNTLYLQMNSLRAEDTAVYYCAKPPRGYNYGPFDYWGQGTLVTVSSASTKGPSVFPLAPCSRSTSESTAALGCLVKDYFPEPVTVSWNSGALTSGVHTFPAVLQSSGLYSLSSVVTVPSSSLGTKTYTCNVDHKPSNTKVDKRVESKYGPPCPPCPAPEFLGGPSVFLFPPKPKDTLMISRTPEVTCVVVDVSQEDPEVQFNWYVDGVEVHNAKTKPREEQFNSTYRVVSVLTVLHQDWLNGKEYKCKVSNKGLPSSIEKTISKAKGQPREPQVYTLPPSQEEMTKNQVSLTCLVKGFYPSDIAVEWESNGQPENNYKTTPPVLDSDGSFFLYSRLTVDKSRWQEGNVFSCSVMHEALHNHYTQKSLSLSLGAGGGGSGGGGSGGGGSGGGGSGAPLKIQAYFNETADLPCQFANSQNVSLSELVVLWQDQENLVLNEVYLGKEKFDSVHSKYMGRTSFDSDSWTLRLHNLQIKDKGLYQCILIHKKPTGMIRIHQMNSELSVLANFSQPEIVPISNITENVYINLTCSSIHGYPEPKKMSVLLRTKNSTIEYDGVMQKSQDNVTELYDVSISLSVSFPDVTSNMTIFCILETDKTRLLSSPFSIELEDPQPPPDHIP

SEQ ID NO: 768 - protein, 774 aa, synthetic construct
  REGION 1..774: note = LAG3 97-156-sugemalimab antibody heavy chain -CD86 ECD-Q25V/F33L/M60R/H90I
RRYTVLSVGPGGLRSGRLPLQPRVQLDERGRQRGDFSLWLRPARRADAGEYRAAVHLRDRGGGGSGGGGSGGGGSGGGGSGEVQLLESGGGLVQPGGSLRLSCAASGFTFSSYAMSWVRQAPGKGLEWVSGISGSGGFTYYADSVKGRFTISRDNSKNTLYLQMNSLRAEDTAVYYCAKPPRGYNYGPFDYWGQGTLVTVSSASTKGPSVFPLAPCSRSTSESTAALGCLVKDYFPEPVTVSWNSGALTSGVHTFPAVLQSSGLYSLSSVVTVPSSSLGTKTYTCNVDHKPSNTKVDKRVESKYGPPCPPCPAPEFLGGPSVFLFPPKPKDTLMISRTPEVTCVVVDVSQEDPEVQFNWYVDGVEVHNAKTKPREEQFNSTYRVVSVLTVLHQDWLNGKEYKCKVSNKGLPSSIEKTISKAKGQPREPQVYTLPPSQEEMTKNQVSLTCLVKGFYPSDIAVEWESNGQPENNYKTTPPVLDSDGSFFLYSRLTVDKSRWQEGNVFSCSVMHEALHNHYTQKSLSLSLGAGGGGSGGGGSGGGGSGGGGSGAPLKIQAYFNETADLPCQFANSQNVSLSELVVLWQDQENLVLNEVYLGKEKFDSVHSKYRGRTSFDSDSWTLRLHNLQIKDKGLYQCIIIHKKPTGMIRIHQMNSELSVLANFSQPEIVPISNITENVYINLTCSSIHGYPEPKKMSVLLRTKNSTIEYDGVMQKSQDNVTELYDVSISLSVSFPDVTSNMTIFCILETDKTRLLSSPFSIELEDPQPPPDHIP

SEQ ID NO: 769 - protein, 774 aa, synthetic construct
  REGION 1..774: note = LAG3 97-156-sugemalimab antibody heavy chain -CD86 ECD-Q25F/F33L/H90I
RRYTVLSVGPGGLRSGRLPLQPRVQLDERGRQRGDFSLWLRPARRADAGEYRAAVHLRDRGGGGSGGGGSGGGGSGGGGSGEVQLLESGGGLVQPGGSLRLSCAASGFTFSSYAMSWVRQAPGKGLEWVSGISGSGGFTYYADSVKGRFTISRDNSKNTLYLQMNSLRAEDTAVYYCAKPPRGYNYGPFDYWGQGTLVTVSSASTKGPSVFPLAPCSRSTSESTAALGCLVKDYFPEPVTVSWNSGALTSGVHTFPAVLQSSGLYSLSSVVTVPSSSLGTKTYTCNVDHKPSNTKVDKRVESKYGPPCPPCPAPEFLGGPSVFLFPPKPKDTLMISRTPEVTCVVVDVSQEDPEVQFNWYVDGVEVHNAKTKPREEQFNSTYRVVSVLTVLHQDWLNGKEYKCKVSNKGLPSSIEKTISKAKGQPREPQVYTLPPSQEEMTKNQVSLTCLVKGFYPSDIAVEWESNGQPENNYKTTPPVLDSDGSFFLYSRLTVDKSRWQEGNVFSCSVMHEALHNHYTQKSLSLSLGAGGGGSGGGGSGGGGSGGGGSGAPLKIQAYFNETADLPCQFANSQNFSLSELVVLWQDQENLVLNEVYLGKEKFDSVHSKYMGRTSFDSDSWTLRLHNLQIKDKGLYQCIIIHKKPTGMIRIHQMNSELSVLANFSQPEIVPISNITENVYINLTCSSIHGYPEPKKMSVLLRTKNSTIEYDGVMQKSQDNVTELYDVSISLSVSFPDVTSNMTIFCILETDKTRLLSSPFSIELEDPQPPPDHIP

SEQ ID NO: 770 - protein, 774 aa, synthetic construct
  REGION 1..774: note = LAG3 97-156-sugemalimab antibody heavy chain -CD86 ECD-Q25I/F33L/H90F
RRYTVLSVGPGGLRSGRLPLQPRVQLDERGRQRGDFSLWLRPARRADAGEYRAAVHLRDRGGGGSGGGGSGGGGSGGGGSGEVQLLESGGGLVQPGGSLRLSCAASGFTFSSYAMSWVRQAPGKGLEWVSGISGSGGFTYYADSVKGRFTISRDNSKNTLYLQMNSLRAEDTAVYYCAKPPRGYNYGPFDYWGQGTLVTVSSASTKGPSVFPLAPCSRSTSESTAALGCLVKDYFPEPVTVSWNSGALTSGVHTFPAVLQSSGLYSLSSVVTVPSSSLGTKTYTCNVDHKPSNTKVDKRVESKYGPPCPPCPAPEFLGGPSVFLFPPKPKDTLMISRTPEVTCVVVDVSQEDPEVQFNWYVDGVEVHNAKTKPREEQFNSTYRVVSVLTVLHQDWLNGKEYKCKVSNKGLPSSIEKTISKAKGQPREPQVYTLPPSQEEMTKNQVSLTCLVKGFYPSDIAVEWESNGQPENNYKTTPPVLDSDGSFFLYSRLTVDKSRWQEGNVFSCSVMHEALHNHYTQKSLSLSLGAGGGGSGGGGSGGGGSGGGGSGAPLKIQAYFNETADLPCQFANSQNISLSELVVLWQDQENLVLNEVYLGKEKFDSVHSKYMGRTSFDSDSWTLRLHNLQIKDKGLYQCIIFHKKPTGMIRIHQMNSELSVLANFSQPEIVPISNITENVYINLTCSSIHGYPEPKKMSVLLRTKNSTIEYDGVMQKSQDNVTELYDVSISLSVSFPDVTSNMTIFCILETDKTRLLSSPFSIELEDPQPPPDHIP

SEQ ID NO: 771 - protein, 774 aa, synthetic construct
  REGION 1..774: note = LAG3 97-156-sugemalimab antibody heavy chain -CD86 ECD-Q25I/F33A/H90I
RRYTVLSVGPGGLRSGRLPLQPRVQLDERGRQRGDFSLWLRPARRADAGEYRAAVHLRDRGGGGSGGGGSGGGGSGGGGSGEVQLLESGGGLVQPGGSLRLSCAASGFTFSSYAMSWVRQAPGKGLEWVSGISGSGGFTYYADSVKGRFTISRDNSKNTLYLQMNSLRAEDTAVYYCAKPPRGYNYGPFDYWGQGTLVTVSSASTKGPSVFPLAPCSRSTSESTAALGCLVKDYFPEPVTVSWNSGALTSGVHTFPAVLQSSGLYSLSSVVTVPSSSLGTKTYTCNVDHKPSNTKVDKRVESKYGPPCPPCPAPEFLGGPSVFLFPPKPKDTLMISRTPEVTCVVVDVSQEDPEVQFNWYVDGVEVHNAKTKPREEQFNSTYRVVSVLTVLHQDWLNGKEYKCKVSNKGLPSSIEKTISKAKGQPREPQVYTLPPSQEEMTKNQVSLTCLVKGFYPSDIAVEWESNGQPENNYKTTPPVLDSDGSFFLYSRLTVDKSRWQEGNVFSCSVMHEALHNHYTQKSLSLSLGAGGGGSGGGGSGGGGSGGGGSGAPLKIQAYFNETADLPCQFANSQNISLSELVVAWQDQENLVLNEVYLGKEKFDSVHSKYMGRTSFDSDSWTLRLHNLQIKDKGLYQCIIIHKKPTGMIRIHQMNSELSVLANFSQPEIVPISNITENVYINLTCSSIHGYPEPKKMSVLLRTKNSTIEYDGVMQKSQDNVTELYDVSISLSVSFPDVTSNMTIFCILETDKTRLLSSPFSIELEDPQPPPDHIP

SEQ ID NO: 772 - protein, 774 aa, synthetic construct
  REGION 1..774: note = LAG3 97-156-sugemalimab antibody heavy chain -CD86 ECD-Q25I/H90I
RRYTVLSVGPGGLRSGRLPLQPRVQLDERGRQRGDFSLWLRPARRADAGEYRAAVHLRDRGGGGSGGGGSGGGGSGGGGSGEVQLLESGGGLVQPGGSLRLSCAASGFTFSSYAMSWVRQAPGKGLEWVSGISGSGGFTYYADSVKGRFTISRDNSKNTLYLQMNSLRAEDTAVYYCAKPPRGYNYGPFDYWGQGTLVTVSSASTKGPSVFPLAPCSRSTSESTAALGCLVKDYFPEPVTVSWNSGALTSGVHTFPAVLQSSGLYSLSSVVTVPSSSLGTKTYTCNVDHKPSNTKVDKRVESKYGPPCPPCPAPEFLGGPSVFLFPPKPKDTLMISRTPEVTCVVVDVSQEDPEVQFNWYVDGVEVHNAKTKPREEQFNSTYRVVSVLTVLHQDWLNGKEYKCKVSNKGLPSSIEKTISKAKGQPREPQVYTLPPSQEEMTKNQVSLTCLVKGFYPSDIAVEWESNGQPENNYKTTPPVLDSDGSFFLYSRLTVDKSRWQEGNVFSCSVMHEALHNHYTQKSLSLSLGAGGGGSGGGGSGGGGSGGGGSGAPLKIQAYFNETADLPCQFANSQNISLSELVVFWQDQENLVLNEVYLGKEKFDSVHSKYMGRTSFDSDSWTLRLHNLQIKDKGLYQCIIIHKKPTGMIRIHQMNSELSVLANFSQPEIVPISNITENVYINLTCSSIHGYPEPKKMSVLLRTKNSTIEYDGVMQKSQDNVTELYDVSISLSVSFPDVTSNMTIFCILETDKTRLLSSPFSIELEDPQPPPDHIP

SEQ ID NO: 773 - protein, 774 aa, synthetic construct
  REGION 1..774: note = LAG3 97-156-sugemalimab antibody heavy chain -CD86 ECD-Q25V/H90V
RRYTVLSVGPGGLRSGRLPLQPRVQLDERGRQRGDFSLWLRPARRADAGEYRAAVHLRDRGGGGSGGGGSGGGGSGGGGSGEVQLLESGGGLVQPGGSLRLSCAASGFTFSSYAMSWVRQAPGKGLEWVSGISGSGGFTYYADSVKGRFTISRDNSKNTLYLQMNSLRAEDTAVYYCAKPPRGYNYGPFDYWGQGTLVTVSSASTKGPSVFPLAPCSRSTSESTAALGCLVKDYFPEPVTVSWNSGALTSGVHTFPAVLQSSGLYSLSSVVTVPSSSLGTKTYTCNVDHKPSNTKVDKRVESKYGPPCPPCPAPEFLGGPSVFLFPPKPKDTLMISRTPEVTCVVVDVSQEDPEVQFNWYVDGVEVHNAKTKPREEQFNSTYRVVSVLTVLHQDWLNGKEYKCKVSNKGLPSSIEKTISKAKGQPREPQVYTLPPSQEEMTKNQVSLTCLVKGFYPSDIAVEWESNGQPENNYKTTPPVLDSDGSFFLYSRLTVDKSRWQEGNVFSCSVMHEALHNHYTQKSLSLSLGAGGGGSGGGGSGGGGSGGGGSGAPLKIQAYFNETADLPCQFANSQNVSLSELVVFWQDQENLVLNEVYLGKEKFDSVHSKYMGRTSFDSDSWTLRLHNLQIKDKGLYQCIIVHKKPTGMIRIHQMNSELSVLANFSQPEIVPISNITENVYINLTCSSIHGYPEPKKMSVLLRTKNSTIEYDGVMQKSQDNVTELYDVSISLSVSFPDVTSNMTIFCILETDKTRLLSSPFSIELEDPQPPPDHIP

SEQ ID NO: 774 - protein, 774 aa, synthetic construct
  REGION 1..774: note = LAG3 97-156-sugemalimab antibody heavy chain -CD86 ECD-Q25V/H90I
RRYTVLSVGPGGLRSGRLPLQPRVQLDERGRQRGDFSLWLRPARRADAGEYRAAVHLRDRGGGGSGGGGSGGGGSGGGGSGEVQLLESGGGLVQPGGSLRLSCAASGFTFSSYAMSWVRQAPGKGLEWVSGISGSGGFTYYADSVKGRFTISRDNSKNTLYLQMNSLRAEDTAVYYCAKPPRGYNYGPFDYWGQGTLVTVSSASTKGPSVFPLAPCSRSTSESTAALGCLVKDYFPEPVTVSWNSGALTSGVHTFPAVLQSSGLYSLSSVVTVPSSSLGTKTYTCNVDHKPSNTKVDKRVESKYGPPCPPCPAPEFLGGPSVFLFPPKPKDTLMISRTPEVTCVVVDVSQEDPEVQFNWYVDGVEVHNAKTKPREEQFNSTYRVVSVLTVLHQDWLNGKEYKCKVSNKGLPSSIEKTISKAKGQPREPQVYTLPPSQEEMTKNQVSLTCLVKGFYPSDIAVEWESNGQPENNYKTTPPVLDSDGSFFLYSRLTVDKSRWQEGNVFSCSVMHEALHNHYTQKSLSLSLGAGGGGSGGGGSGGGGSGGGGSGAPLKIQAYFNETADLPCQFANSQNVSLSELVVFWQDQENLVLNEVYLGKEKFDSVHSKYMGRTSFDSDSWTLRLHNLQIKDKGLYQCIIIHKKPTGMIRIHQMNSELSVLANFSQPEIVPISNITENVYINLTCSSIHGYPEPKKMSVLLRTKNSTIEYDGVMQKSQDNVTELYDVSISLSVSFPDVTSNMTIFCILETDKTRLLSSPFSIELEDPQPPPDHIP

SEQ ID NO: 775 - protein, 774 aa, synthetic construct
  REGION 1..774: note = LAG3 97-156-sugemalimab antibody heavy chain -CD86 ECD-Q25F/H90I
RRYTVLSVGPGGLRSGRLPLQPRVQLDERGRQRGDFSLWLRPARRADAGEYRAAVHLRDRGGGGSGGGGSGGGGSGGGGSGEVQLLESGGGLVQPGGSLRLSCAASGFTFSSYAMSWVRQAPGKGLEWVSGISGSGGFTYYADSVKGRFTISRDNSKNTLYLQMNSLRAEDTAVYYCAKPPRGYNYGPFDYWGQGTLVTVSSASTKGPSVFPLAPCSRSTSESTAALGCLVKDYFPEPVTVSWNSGALTSGVHTFPAVLQSSGLYSLSSVVTVPSSSLGTKTYTCNVDHKPSNTKVDKRVESKYGPPCPPCPAPEFLGGPSVFLFPPKPKDTLMISRTPEVTCVVVDVSQEDPEVQFNWYVDGVEVHNAKTKPREEQFNSTYRVVSVLTVLHQDWLNGKEYKCKVSNKGLPSSIEKTISKAKGQPREPQVYTLPPSQEEMTKNQVSLTCLVKGFYPSDIAVEWESNGQPENNYKTTPPVLDSDGSFFLYSRLTVDKSRWQEGNVFSCSVMHEALHNHYTQKSLSLSLGAGGGGSGGGGSGGGGSGGGGSGAPLKIQAYFNETADLPCQFANSQNFSLSELVVFWQDQENLVLNEVYLGKEKFDSVHSKYMGRTSFDSDSWTLRLHNLQIKDKGLYQCIIIHKKPTGMIRIHQMNSELSVLANFSQPEIVPISNITENVYINLTCSSIHGYPEPKKMSVLLRTKNSTIEYDGVMQKSQDNVTELYDVSISLSVSFPDVTSNMTIFCILETDKTRLLSSPFSIELEDPQPPPDHIP

SEQ ID NO: 776 - protein, 774 aa, synthetic construct
  REGION 1..774: note = LAG3 97-156-sugemalimab antibody heavy chain -CD86 ECD-Q25F/H90V
RRYTVLSVGPGGLRSGRLPLQPRVQLDERGRQRGDFSLWLRPARRADAGEYRAAVHLRDRGGGGSGGGGSGGGGSGGGGSGEVQLLESGGGLVQPGGSLRLSCAASGFTFSSYAMSWVRQAPGKGLEWVSGISGSGGFTYYADSVKGRFTISRDNSKNTLYLQMNSLRAEDTAVYYCAKPPRGYNYGPFDYWGQGTLVTVSSASTKGPSVFPLAPCSRSTSESTAALGCLVKDYFPEPVTVSWNSGALTSGVHTFPAVLQSSGLYSLSSVVTVPSSSLGTKTYTCNVDHKPSNTKVDKRVESKYGPPCPPCPAPEFLGGPSVFLFPPKPKDTLMISRTPEVTCVVVDVSQEDPEVQFNWYVDGVEVHNAKTKPREEQFNSTYRVVSVLTVLHQDWLNGKEYKCKVSNKGLPSSIEKTISKAKGQPREPQVYTLPPSQEEMTKNQVSLTCLVKGFYPSDIAVEWESNGQPENNYKTTPPVLDSDGSFFLYSRLTVDKSRWQEGNVFSCSVMHEALHNHYTQKSLSLSLGAGGGGSGGGGSGGGGSGGGGSGAPLKIQAYFNETADLPCQFANSQNFSLSELVVFWQDQENLVLNEVYLGKEKFDSVHSKYMGRTSFDSDSWTLRLHNLQIKDKGLYQCIIVHKKPTGMIRIHQMNSELSVLANFSQPEIVPISNITENVYINLTCSSIHGYPEPKKMSVLLRTKNSTIEYDGVMQKSQDNVTELYDVSISLSVSFPDVTSNMTIFCILETDKTRLLSSPFSIELEDPQPPPDHIP

SEQ ID NO: 777 - protein, 774 aa, synthetic construct
  REGION 1..774: note = LAG3 97-156-sugemalimab antibody heavy chain -CD86 ECD-A13F/Q25I/F33L/H90I
RRYTVLSVGPGGLRSGRLPLQPRVQLDERGRQRGDFSLWLRPARRADAGEYRAAVHLRDRGGGGSGGGGSGGGGSGGGGSGEVQLLESGGGLVQPGGSLRLSCAASGFTFSSYAMSWVRQAPGKGLEWVSGISGSGGFTYYADSVKGRFTISRDNSKNTLYLQMNSLRAEDTAVYYCAKPPRGYNYGPFDYWGQGTLVTVSSASTKGPSVFPLAPCSRSTSESTAALGCLVKDYFPEPVTVSWNSGALTSGVHTFPAVLQSSGLYSLSSVVTVPSSSLGTKTYTCNVDHKPSNTKVDKRVESKYGPPCPPCPAPEFLGGPSVFLFPPKPKDTLMISRTPEVTCVVVDVSQEDPEVQFNWYVDGVEVHNAKTKPREEQFNSTYRVVSVLTVLHQDWLNGKEYKCKVSNKGLPSSIEKTISKAKGQPREPQVYTLPPSQEEMTKNQVSLTCLVKGFYPSDIAVEWESNGQPENNYKTTPPVLDSDGSFFLYSRLTVDKSRWQEGNVFSCSVMHEALHNHYTQKSLSLSLGAGGGGSGGGGSGGGGSGGGGSGAPLKIQAYFNETFDLPCQFANSQNISLSELVVLWQDQENLVLNEVYLGKEKFDSVHSKYMGRTSFDSDSWTLRLHNLQIKDKGLYQCIIIHKKPTGMIRIHQMNSELSVLANFSQPEIVPISNITENVYINLTCSSIHGYPEPKKMSVLLRTKNSTIEYDGVMQKSQDNVTELYDVSISLSVSFPDVTSNMTIFCILETDKTRLLSSPFSIELEDPQPPPDHIP

SEQ ID NO: 778 - protein, 774 aa, synthetic construct
  REGION 1..774: note = LAG3 97-156-sugemalimab antibody heavy chain -CD86 ECD-A13M/Q25I/F33L/H90I
RRYTVLSVGPGGLRSGRLPLQPRVQLDERGRQRGDFSLWLRPARRADAGEYRAAVHLRDRGGGGSGGGGSGGGGSGGGGSGEVQLLESGGGLVQPGGSLRLSCAASGFTFSSYAMSWVRQAPGKGLEWVSGISGSGGFTYYADSVKGRFTISRDNSKNTLYLQMNSLRAEDTAVYYCAKPPRGYNYGPFDYWGQGTLVTVSSASTKGPSVFPLAPCSRSTSESTAALGCLVKDYFPEPVTVSWNSGALTSGVHTFPAVLQSSGLYSLSSVVTVPSSSLGTKTYTCNVDHKPSNTKVDKRVESKYGPPCPPCPAPEFLGGPSVFLFPPKPKDTLMISRTPEVTCVVVDVSQEDPEVQFNWYVDGVEVHNAKTKPREEQFNSTYRVVSVLTVLHQDWLNGKEYKCKVSNKGLPSSIEKTISKAKGQPREPQVYTLPPSQEEMTKNQVSLTCLVKGFYPSDIAVEWESNGQPENNYKTTPPVLDSDGSFFLYSRLTVDKSRWQEGNVFSCSVMHEALHNHYTQKSLSLSLGAGGGGSGGGGSGGGGSGGGGSGAPLKIQAYFNETMDLPCQFANSQNISLSELVVLWQDQENLVLNEVYLGKEKFDSVHSKYMGRTSFDSDSWTLRLHNLQIKDKGLYQCIIIHKKPTGMIRIHQMNSELSVLANFSQPEIVPISNITENVYINLTCSSIHGYPEPKKMSVLLRTKNSTIEYDGVMQKSQDNVTELYDVSISLSVSFPDVTSNMTIFCILETDKTRLLSSPFSIELEDPQPPPDHIP

SEQ ID NO: 779 - protein, 774 aa, synthetic construct
  REGION 1..774: note = LAG3 97-156-sugemalimab antibody heavy chain -CD86 ECD-Q25A/F33L/H90I
RRYTVLSVGPGGLRSGRLPLQPRVQLDERGRQRGDFSLWLRPARRADAGEYRAAVHLRDRGGGGSGGGGSGGGGSGGGGSGEVQLLESGGGLVQPGGSLRLSCAASGFTFSSYAMSWVRQAPGKGLEWVSGISGSGGFTYYADSVKGRFTISRDNSKNTLYLQMNSLRAEDTAVYYCAKPPRGYNYGPFDYWGQGTLVTVSSASTKGPSVFPLAPCSRSTSESTAALGCLVKDYFPEPVTVSWNSGALTSGVHTFPAVLQSSGLYSLSSVVTVPSSSLGTKTYTCNVDHKPSNTKVDKRVESKYGPPCPPCPAPEFLGGPSVFLFPPKPKDTLMISRTPEVTCVVVDVSQEDPEVQFNWYVDGVEVHNAKTKPREEQFNSTYRVVSVLTVLHQDWLNGKEYKCKVSNKGLPSSIEKTISKAKGQPREPQVYTLPPSQEEMTKNQVSLTCLVKGFYPSDIAVEWESNGQPENNYKTTPPVLDSDGSFFLYSRLTVDKSRWQEGNVFSCSVMHEALHNHYTQKSLSLSLGAGGGGSGGGGSGGGGSGGGGSGAPLKIQAYFNETADLPCQFANSQNASLSELVVLWQDQENLVLNEVYLGKEKFDSVHSKYMGRTSFDSDSWTLRLHNLQIKDKGLYQCIIIHKKPTGMIRIHQMNSELSVLANFSQPEIVPISNITENVYINLTCSSIHGYPEPKKMSVLLRTKNSTIEYDGVMQKSQDNVTELYDVSISLSVSFPDVTSNMTIFCILETDKTRLLSSPFSIELEDPQPPPDHIP

SEQ ID NO: 780 - protein, 774 aa, synthetic construct
  REGION 1..774: note = LAG3 97-156-sugemalimab antibody heavy chain -CD86 ECD-Q25M/F33L/H90I
RRYTVLSVGPGGLRSGRLPLQPRVQLDERGRQRGDFSLWLRPARRADAGEYRAAVHLRDRGGGGSGGGGSGGGGSGGGGSGEVQLLESGGGLVQPGGSLRLSCAASGFTFSSYAMSWVRQAPGKGLEWVSGISGSGGFTYYADSVKGRFTISRDNSKNTLYLQMNSLRAEDTAVYYCAKPPRGYNYGPFDYWGQGTLVTVSSASTKGPSVFPLAPCSRSTSESTAALGCLVKDYFPEPVTVSWNSGALTSGVHTFPAVLQSSGLYSLSSVVTVPSSSLGTKTYTCNVDHKPSNTKVDKRVESKYGPPCPPCPAPEFLGGPSVFLFPPKPKDTLMISRTPEVTCVVVDVSQEDPEVQFNWYVDGVEVHNAKTKPREEQFNSTYRVVSVLTVLHQDWLNGKEYKCKVSNKGLPSSIEKTISKAKGQPREPQVYTLPPSQEEMTKNQVSLTCLVKGFYPSDIAVEWESNGQPENNYKTTPPVLDSDGSFFLYSRLTVDKSRWQEGNVFSCSVMHEALHNHYTQKSLSLSLGAGGGGSGGGGSGGGGSGGGGSGAPLKIQAYFNETADLPCQFANSQNMSLSELVVLWQDQENLVLNEVYLGKEKFDSVHSKYMGRTSFDSDSWTLRLHNLQIKDKGLYQCIIIHKKPTGMIRIHQMNSELSVLANFSQPEIVPISNITENVYINLTCSSIHGYPEPKKMSVLLRTKNSTIEYDGVMQKSQDNVTELYDVSISLSVSFPDVTSNMTIFCILETDKTRLLSSPFSIELEDPQPPPDHIP

SEQ ID NO: 781 - protein, 774 aa, synthetic construct
  REGION 1..774: note = LAG3 97-156-sugemalimab antibody heavy chain -CD86 ECD-Q25I/F33M/H90I
RRYTVLSVGPGGLRSGRLPLQPRVQLDERGRQRGDFSLWLRPARRADAGEYRAAVHLRDRGGGGSGGGGSGGGGSGGGGSGEVQLLESGGGLVQPGGSLRLSCAASGFTFSSYAMSWVRQAPGKGLEWVSGISGSGGFTYYADSVKGRFTISRDNSKNTLYLQMNSLRAEDTAVYYCAKPPRGYNYGPFDYWGQGTLVTVSSASTKGPSVFPLAPCSRSTSESTAALGCLVKDYFPEPVTVSWNSGALTSGVHTFPAVLQSSGLYSLSSVVTVPSSSLGTKTYTCNVDHKPSNTKVDKRVESKYGPPCPPCPAPEFLGGPSVFLFPPKPKDTLMISRTPEVTCVVVDVSQEDPEVQFNWYVDGVEVHNAKTKPREEQFNSTYRVVSVLTVLHQDWLNGKEYKCKVSNKGLPSSIEKTISKAKGQPREPQVYTLPPSQEEMTKNQVSLTCLVKGFYPSDIAVEWESNGQPENNYKTTPPVLDSDGSFFLYSRLTVDKSRWQEGNVFSCSVMHEALHNHYTQKSLSLSLGAGGGGSGGGGSGGGGSGGGGSGAPLKIQAYFNETADLPCQFANSQNISLSELVVMWQDQENLVLNEVYLGKEKFDSVHSKYMGRTSFDSDSWTLRLHNLQIKDKGLYQCIIIHKKPTGMIRIHQMNSELSVLANFSQPEIVPISNITENVYINLTCSSIHGYPEPKKMSVLLRTKNSTIEYDGVMQKSQDNVTELYDVSISLSVSFPDVTSNMTIFCILETDKTRLLSSPFSIELEDPQPPPDHIP

SEQ ID NO: 782 - protein, 774 aa, synthetic construct
  REGION 1..774: note = LAG3 97-156-sugemalimab antibody heavy chain -CD86 ECD-Q25I/F33L/I89V/H90I
RRYTVLSVGPGGLRSGRLPLQPRVQLDERGRQRGDFSLWLRPARRADAGEYRAAVHLRDRGGGGSGGGGSGGGGSGGGGSGEVQLLESGGGLVQPGGSLRLSCAASGFTFSSYAMSWVRQAPGKGLEWVSGISGSGGFTYYADSVKGRFTISRDNSKNTLYLQMNSLRAEDTAVYYCAKPPRGYNYGPFDYWGQGTLVTVSSASTKGPSVFPLAPCSRSTSESTAALGCLVKDYFPEPVTVSWNSGALTSGVHTFPAVLQSSGLYSLSSVVTVPSSSLGTKTYTCNVDHKPSNTKVDKRVESKYGPPCPPCPAPEFLGGPSVFLFPPKPKDTLMISRTPEVTCVVVDVSQEDPEVQFNWYVDGVEVHNAKTKPREEQFNSTYRVVSVLTVLHQDWLNGKEYKCKVSNKGLPSSIEKTISKAKGQPREPQVYTLPPSQEEMTKNQVSLTCLVKGFYPSDIAVEWESNGQPENNYKTTPPVLDSDGSFFLYSRLTVDKSRWQEGNVFSCSVMHEALHNHYTQKSLSLSLGAGGGGSGGGGSGGGGSGGGGSGAPLKIQAYFNETADLPCQFANSQNISLSELVVLWQDQENLVLNEVYLGKEKFDSVHSKYMGRTSFDSDSWTLRLHNLQIKDKGLYQCIVIHKKPTGMIRIHQMNSELSVLANFSQPEIVPISNITENVYINLTCSSIHGYPEPKKMSVLLRTKNSTIEYDGVMQKSQDNVTELYDVSISLSVSFPDVTSNMTIFCILETDKTRLLSSPFSIELEDPQPPPDHIP

SEQ ID NO: 783 - protein, 774 aa, synthetic construct
  REGION 1..774: note = LAG3 97-156-sugemalimab antibody heavy chain -CD86 ECD-Q25I/F33L/I89F/H90I
RRYTVLSVGPGGLRSGRLPLQPRVQLDERGRQRGDFSLWLRPARRADAGEYRAAVHLRDRGGGGSGGGGSGGGGSGGGGSGEVQLLESGGGLVQPGGSLRLSCAASGFTFSSYAMSWVRQAPGKGLEWVSGISGSGGFTYYADSVKGRFTISRDNSKNTLYLQMNSLRAEDTAVYYCAKPPRGYNYGPFDYWGQGTLVTVSSASTKGPSVFPLAPCSRSTSESTAALGCLVKDYFPEPVTVSWNSGALTSGVHTFPAVLQSSGLYSLSSVVTVPSSSLGTKTYTCNVDHKPSNTKVDKRVESKYGPPCPPCPAPEFLGGPSVFLFPPKPKDTLMISRTPEVTCVVVDVSQEDPEVQFNWYVDGVEVHNAKTKPREEQFNSTYRVVSVLTVLHQDWLNGKEYKCKVSNKGLPSSIEKTISKAKGQPREPQVYTLPPSQEEMTKNQVSLTCLVKGFYPSDIAVEWESNGQPENNYKTTPPVLDSDGSFFLYSRLTVDKSRWQEGNVFSCSVMHEALHNHYTQKSLSLSLGAGGGGSGGGGSGGGGSGGGGSGAPLKIQAYFNETADLPCQFANSQNISLSELVVLWQDQENLVLNEVYLGKEKFDSVHSKYMGRTSFDSDSWTLRLHNLQIKDKGLYQCIFIHKKPTGMIRIHQMNSELSVLANFSQPEIVPISNITENVYINLTCSSIHGYPEPKKMSVLLRTKNSTIEYDGVMQKSQDNVTELYDVSISLSVSFPDVTSNMTIFCILETDKTRLLSSPFSIELEDPQPPPDHIP

SEQ ID NO: 784 - protein, 774 aa, synthetic construct
  REGION 1..774: note = LAG3 97-156-sugemalimab antibody heavy chain -CD86 ECD-Q25I/F33L/I89M/H90I
RRYTVLSVGPGGLRSGRLPLQPRVQLDERGRQRGDFSLWLRPARRADAGEYRAAVHLRDRGGGGSGGGGSGGGGSGGGGSGEVQLLESGGGLVQPGGSLRLSCAASGFTFSSYAMSWVRQAPGKGLEWVSGISGSGGFTYYADSVKGRFTISRDNSKNTLYLQMNSLRAEDTAVYYCAKPPRGYNYGPFDYWGQGTLVTVSSASTKGPSVFPLAPCSRSTSESTAALGCLVKDYFPEPVTVSWNSGALTSGVHTFPAVLQSSGLYSLSSVVTVPSSSLGTKTYTCNVDHKPSNTKVDKRVESKYGPPCPPCPAPEFLGGPSVFLFPPKPKDTLMISRTPEVTCVVVDVSQEDPEVQFNWYVDGVEVHNAKTKPREEQFNSTYRVVSVLTVLHQDWLNGKEYKCKVSNKGLPSSIEKTISKAKGQPREPQVYTLPPSQEEMTKNQVSLTCLVKGFYPSDIAVEWESNGQPENNYKTTPPVLDSDGSFFLYSRLTVDKSRWQEGNVFSCSVMHEALHNHYTQKSLSLSLGAGGGGSGGGGSGGGGSGGGGSGAPLKIQAYFNETADLPCQFANSQNISLSELVVLWQDQENLVLNEVYLGKEKFDSVHSKYMGRTSFDSDSWTLRLHNLQIKDKGLYQCIMIHKKPTGMIRIHQMNSELSVLANFSQPEIVPISNITENVYINLTCSSIHGYPEPKKMSVLLRTKNSTIEYDGVMQKSQDNVTELYDVSISLSVSFPDVTSNMTIFCILETDKTRLLSSPFSIELEDPQPPPDHIP

SEQ ID NO: 785 - protein, 774 aa, synthetic construct
  REGION 1..774: note = LAG3 97-156-sugemalimab antibody heavy chain -CD86 ECD-Q25I/F33L/H90M
RRYTVLSVGPGGLRSGRLPLQPRVQLDERGRQRGDFSLWLRPARRADAGEYRAAVHLRDRGGGGSGGGGSGGGGSGGGGSGEVQLLESGGGLVQPGGSLRLSCAASGFTFSSYAMSWVRQAPGKGLEWVSGISGSGGFTYYADSVKGRFTISRDNSKNTLYLQMNSLRAEDTAVYYCAKPPRGYNYGPFDYWGQGTLVTVSSASTKGPSVFPLAPCSRSTSESTAALGCLVKDYFPEPVTVSWNSGALTSGVHTFPAVLQSSGLYSLSSVVTVPSSSLGTKTYTCNVDHKPSNTKVDKRVESKYGPPCPPCPAPEFLGGPSVFLFPPKPKDTLMISRTPEVTCVVVDVSQEDPEVQFNWYVDGVEVHNAKTKPREEQFNSTYRVVSVLTVLHQDWLNGKEYKCKVSNKGLPSSIEKTISKAKGQPREPQVYTLPPSQEEMTKNQVSLTCLVKGFYPSDIAVEWESNGQPENNYKTTPPVLDSDGSFFLYSRLTVDKSRWQEGNVFSCSVMHEALHNHYTQKSLSLSLGAGGGGSGGGGSGGGGSGGGGSGAPLKIQAYFNETADLPCQFANSQNISLSELVVLWQDQENLVLNEVYLGKEKFDSVHSKYMGRTSFDSDSWTLRLHNLQIKDKGLYQCIIMHKKPTGMIRIHQMNSELSVLANFSQPEIVPISNITENVYINLTCSSIHGYPEPKKMSVLLRTKNSTIEYDGVMQKSQDNVTELYDVSISLSVSFPDVTSNMTIFCILETDKTRLLSSPFSIELEDPQPPPDHIP

SEQ ID NO: 786 - protein, 774 aa, synthetic construct
  REGION 1..774: note = LAG3 97-156-sugemalimab antibody heavy chain -CD86 ECD
RRYTVLSVGPGGLRSGRLPLQPRVQLDERGRQRGDFSLWLRPARRADAGEYRAAVHLRDRGGGGSGGGGSGGGGSGGGGSGEVQLLESGGGLVQPGGSLRLSCAASGFTFSSYAMSWVRQAPGKGLEWVSGISGSGGFTYYADSVKGRFTISRDNSKNTLYLQMNSLRAEDTAVYYCAKPPRGYNYGPFDYWGQGTLVTVSSASTKGPSVFPLAPCSRSTSESTAALGCLVKDYFPEPVTVSWNSGALTSGVHTFPAVLQSSGLYSLSSVVTVPSSSLGTKTYTCNVDHKPSNTKVDKRVESKYGPPCPPCPAPEFLGGPSVFLFPPKPKDTLMISRTPEVTCVVVDVSQEDPEVQFNWYVDGVEVHNAKTKPREEQFNSTYRVVSVLTVLHQDWLNGKEYKCKVSNKGLPSSIEKTISKAKGQPREPQVYTLPPSQEEMTKNQVSLTCLVKGFYPSDIAVEWESNGQPENNYKTTPPVLDSDGSFFLYSRLTVDKSRWQEGNVFSCSVMHEALHNHYTQKSLSLSLGAGGGGSGGGGSGGGGSGGGGSGAPLKIQAYFNETADLPCQFANSQNQSLSELVVFWQDQENLVLNEVYLGKEKFDSVHSKYMGRTSFDSDSWTLRLHNLQIKDKGLYQCIIHHKKPTGMIRIHQMNSELSVLANFSQPEIVPISNITENVYINLTCSSIHGYPEPKKMSVLLRTKNSTIEYDGVMQKSQDNVTELYDVSISLSVSFPDVTSNMTIFCILETDKTRLLSSPFSIELEDPQPPPDHIP

SEQ ID NO: 787 - protein, 774 aa, synthetic construct
  REGION 1..774: note = LAG3 R97E 97-156-sugemalimab antibody heavy chain -CD86 ECD-Q25I/F33L/H90I
ERYTVLSVGPGGLRSGRLPLQPRVQLDERGRQRGDFSLWLRPARRADAGEYRAAVHLRDRGGGGSGGGGSGGGGSGGGGSGEVQLLESGGGLVQPGGSLRLSCAASGFTFSSYAMSWVRQAPGKGLEWVSGISGSGGFTYYADSVKGRFTISRDNSKNTLYLQMNSLRAEDTAVYYCAKPPRGYNYGPFDYWGQGTLVTVSSASTKGPSVFPLAPCSRSTSESTAALGCLVKDYFPEPVTVSWNSGALTSGVHTFPAVLQSSGLYSLSSVVTVPSSSLGTKTYTCNVDHKPSNTKVDKRVESKYGPPCPPCPAPEFLGGPSVFLFPPKPKDTLMISRTPEVTCVVVDVSQEDPEVQFNWYVDGVEVHNAKTKPREEQFNSTYRVVSVLTVLHQDWLNGKEYKCKVSNKGLPSSIEKTISKAKGQPREPQVYTLPPSQEEMTKNQVSLTCLVKGFYPSDIAVEWESNGQPENNYKTTPPVLDSDGSFFLYSRLTVDKSRWQEGNVFSCSVMHEALHNHYTQKSLSLSLGAGGGGSGGGGSGGGGSGGGGSGAPLKIQAYFNETADLPCQFANSQNISLSELVVLWQDQENLVLNEVYLGKEKFDSVHSKYMGRTSFDSDSWTLRLHNLQIKDKGLYQCIIIHKKPTGMIRIHQMNSELSVLANFSQPEIVPISNITENVYINLTCSSIHGYPEPKKMSVLLRTKNSTIEYDGVMQKSQDNVTELYDVSISLSVSFPDVTSNMTIFCILETDKTRLLSSPFSIELEDPQPPPDHIP

SEQ ID NO: 788 - protein, 774 aa, synthetic construct
  REGION 1..774: note = LAG3 R97E 97-156-sugemalimab antibody heavy chain -CD86-ECD-Q25V/F33L/H90I
ERYTVLSVGPGGLRSGRLPLQPRVQLDERGRQRGDFSLWLRPARRADAGEYRAAVHLRDRGGGGSGGGGSGGGGSGGGGSGEVQLLESGGGLVQPGGSLRLSCAASGFTFSSYAMSWVRQAPGKGLEWVSGISGSGGFTYYADSVKGRFTISRDNSKNTLYLQMNSLRAEDTAVYYCAKPPRGYNYGPFDYWGQGTLVTVSSASTKGPSVFPLAPCSRSTSESTAALGCLVKDYFPEPVTVSWNSGALTSGVHTFPAVLQSSGLYSLSSVVTVPSSSLGTKTYTCNVDHKPSNTKVDKRVESKYGPPCPPCPAPEFLGGPSVFLFPPKPKDTLMISRTPEVTCVVVDVSQEDPEVQFNWYVDGVEVHNAKTKPREEQFNSTYRVVSVLTVLHQDWLNGKEYKCKVSNKGLPSSIEKTISKAKGQPREPQVYTLPPSQEEMTKNQVSLTCLVKGFYPSDIAVEWESNGQPENNYKTTPPVLDSDGSFFLYSRLTVDKSRWQEGNVFSCSVMHEALHNHYTQKSLSLSLGAGGGGSGGGGSGGGGSGGGGSGAPLKIQAYFNETADLPCQFANSQNVSLSELVVLWQDQENLVLNEVYLGKEKFDSVHSKYMGRTSFDSDSWTLRLHNLQIKDKGLYQCIIIHKKPTGMIRIHQMNSELSVLANFSQPEIVPISNITENVYINLTCSSIHGYPEPKKMSVLLRTKNSTIEYDGVMQKSQDNVTELYDVSISLSVSFPDVTSNMTIFCILETDKTRLLSSPFSIELEDPQPPPDHIP

SEQ ID NO: 789 - protein, 774 aa, synthetic construct
  REGION 1..774: note = LAG3 R97E 97-156-sugemalimab antibody heavy chain -CD86 ECD-Q25I/F33V/H90I
ERYTVLSVGPGGLRSGRLPLQPRVQLDERGRQRGDFSLWLRPARRADAGEYRAAVHLRDRGGGGSGGGGSGGGGSGGGGSGEVQLLESGGGLVQPGGSLRLSCAASGFTFSSYAMSWVRQAPGKGLEWVSGISGSGGFTYYADSVKGRFTISRDNSKNTLYLQMNSLRAEDTAVYYCAKPPRGYNYGPFDYWGQGTLVTVSSASTKGPSVFPLAPCSRSTSESTAALGCLVKDYFPEPVTVSWNSGALTSGVHTFPAVLQSSGLYSLSSVVTVPSSSLGTKTYTCNVDHKPSNTKVDKRVESKYGPPCPPCPAPEFLGGPSVFLFPPKPKDTLMISRTPEVTCVVVDVSQEDPEVQFNWYVDGVEVHNAKTKPREEQFNSTYRVVSVLTVLHQDWLNGKEYKCKVSNKGLPSSIEKTISKAKGQPREPQVYTLPPSQEEMTKNQVSLTCLVKGFYPSDIAVEWESNGQPENNYKTTPPVLDSDGSFFLYSRLTVDKSRWQEGNVFSCSVMHEALHNHYTQKSLSLSLGAGGGGSGGGGSGGGGSGGGGSGAPLKIQAYFNETADLPCQFANSQNISLSELVVVWQDQENLVLNEVYLGKEKFDSVHSKYMGRTSFDSDSWTLRLHNLQIKDKGLYQCIIIHKKPTGMIRIHQMNSELSVLANFSQPEIVPISNITENVYINLTCSSIHGYPEPKKMSVLLRTKNSTIEYDGVMQKSQDNVTELYDVSISLSVSFPDVTSNMTIFCILETDKTRLLSSPFSIELEDPQPPPDHIP

SEQ ID NO: 790 - protein, 774 aa, synthetic construct
  REGION 1..774: note = LAG3 R97E 97-156-sugemalimab antibody heavy chain -CD86 ECD-Q25V/F33V/H90I
ERYTVLSVGPGGLRSGRLPLQPRVQLDERGRQRGDFSLWLRPARRADAGEYRAAVHLRDRGGGGSGGGGSGGGGSGGGGSGEVQLLESGGGLVQPGGSLRLSCAASGFTFSSYAMSWVRQAPGKGLEWVSGISGSGGFTYYADSVKGRFTISRDNSKNTLYLQMNSLRAEDTAVYYCAKPPRGYNYGPFDYWGQGTLVTVSSASTKGPSVFPLAPCSRSTSESTAALGCLVKDYFPEPVTVSWNSGALTSGVHTFPAVLQSSGLYSLSSVVTVPSSSLGTKTYTCNVDHKPSNTKVDKRVESKYGPPCPPCPAPEFLGGPSVFLFPPKPKDTLMISRTPEVTCVVVDVSQEDPEVQFNWYVDGVEVHNAKTKPREEQFNSTYRVVSVLTVLHQDWLNGKEYKCKVSNKGLPSSIEKTISKAKGQPREPQVYTLPPSQEEMTKNQVSLTCLVKGFYPSDIAVEWESNGQPENNYKTTPPVLDSDGSFFLYSRLTVDKSRWQEGNVFSCSVMHEALHNHYTQKSLSLSLGAGGGGSGGGGSGGGGSGGGGSGAPLKIQAYFNETADLPCQFANSQNVSLSELVVVWQDQENLVLNEVYLGKEKFDSVHSKYMGRTSFDSDSWTLRLHNLQIKDKGLYQCIIIHKKPTGMIRIHQMNSELSVLANFSQPEIVPISNITENVYINLTCSSIHGYPEPKKMSVLLRTKNSTIEYDGVMQKSQDNVTELYDVSISLSVSFPDVTSNMTIFCILETDKTRLLSSPFSIELEDPQPPPDHIP

SEQ ID NO: 791 - protein, 774 aa, synthetic construct
  REGION 1..774: note = LAG3 R97E 97-156-sugemalimab antibody heavy chain -CD86 ECD-Q25I/F33L/H90V
ERYTVLSVGPGGLRSGRLPLQPRVQLDERGRQRGDFSLWLRPARRADAGEYRAAVHLRDRGGGGSGGGGSGGGGSGGGGSGEVQLLESGGGLVQPGGSLRLSCAASGFTFSSYAMSWVRQAPGKGLEWVSGISGSGGFTYYADSVKGRFTISRDNSKNTLYLQMNSLRAEDTAVYYCAKPPRGYNYGPFDYWGQGTLVTVSSASTKGPSVFPLAPCSRSTSESTAALGCLVKDYFPEPVTVSWNSGALTSGVHTFPAVLQSSGLYSLSSVVTVPSSSLGTKTYTCNVDHKPSNTKVDKRVESKYGPPCPPCPAPEFLGGPSVFLFPPKPKDTLMISRTPEVTCVVVDVSQEDPEVQFNWYVDGVEVHNAKTKPREEQFNSTYRVVSVLTVLHQDWLNGKEYKCKVSNKGLPSSIEKTISKAKGQPREPQVYTLPPSQEEMTKNQVSLTCLVKGFYPSDIAVEWESNGQPENNYKTTPPVLDSDGSFFLYSRLTVDKSRWQEGNVFSCSVMHEALHNHYTQKSLSLSLGAGGGGSGGGGSGGGGSGGGGSGAPLKIQAYFNETADLPCQFANSQNISLSELVVLWQDQENLVLNEVYLGKEKFDSVHSKYMGRTSFDSDSWTLRLHNLQIKDKGLYQCIIVHKKPTGMIRIHQMNSELSVLANFSQPEIVPISNITENVYINLTCSSIHGYPEPKKMSVLLRTKNSTIEYDGVMQKSQDNVTELYDVSISLSVSFPDVTSNMTIFCILETDKTRLLSSPFSIELEDPQPPPDHIP

SEQ ID NO: 792 - protein, 774 aa, synthetic construct
  REGION 1..774: note = LAG3 R97E 97-156-sugemalimab antibody heavy chain -CD86 ECD-Q25V/F33L/H90V
ERYTVLSVGPGGLRSGRLPLQPRVQLDERGRQRGDFSLWLRPARRADAGEYRAAVHLRDRGGGGSGGGGSGGGGSGGGGSGEVQLLESGGGLVQPGGSLRLSCAASGFTFSSYAMSWVRQAPGKGLEWVSGISGSGGFTYYADSVKGRFTISRDNSKNTLYLQMNSLRAEDTAVYYCAKPPRGYNYGPFDYWGQGTLVTVSSASTKGPSVFPLAPCSRSTSESTAALGCLVKDYFPEPVTVSWNSGALTSGVHTFPAVLQSSGLYSLSSVVTVPSSSLGTKTYTCNVDHKPSNTKVDKRVESKYGPPCPPCPAPEFLGGPSVFLFPPKPKDTLMISRTPEVTCVVVDVSQEDPEVQFNWYVDGVEVHNAKTKPREEQFNSTYRVVSVLTVLHQDWLNGKEYKCKVSNKGLPSSIEKTISKAKGQPREPQVYTLPPSQEEMTKNQVSLTCLVKGFYPSDIAVEWESNGQPENNYKTTPPVLDSDGSFFLYSRLTVDKSRWQEGNVFSCSVMHEALHNHYTQKSLSLSLGAGGGGSGGGGSGGGGSGGGGSGAPLKIQAYFNETADLPCQFANSQNVSLSELVVLWQDQENLVLNEVYLGKEKFDSVHSKYMGRTSFDSDSWTLRLHNLQIKDKGLYQCIIVHKKPTGMIRIHQMNSELSVLANFSQPEIVPISNITENVYINLTCSSIHGYPEPKKMSVLLRTKNSTIEYDGVMQKSQDNVTELYDVSISLSVSFPDVTSNMTIFCILETDKTRLLSSPFSIELEDPQPPPDHIP

SEQ ID NO: 793 - protein, 774 aa, synthetic construct
  REGION 1..774: note = LAG3 R97E 97-156-sugemalimab antibody heavy chain -CD86 ECD-Q25I/F33V/H90V
ERYTVLSVGPGGLRSGRLPLQPRVQLDERGRQRGDFSLWLRPARRADAGEYRAAVHLRDRGGGGSGGGGSGGGGSGGGGSGEVQLLESGGGLVQPGGSLRLSCAASGFTFSSYAMSWVRQAPGKGLEWVSGISGSGGFTYYADSVKGRFTISRDNSKNTLYLQMNSLRAEDTAVYYCAKPPRGYNYGPFDYWGQGTLVTVSSASTKGPSVFPLAPCSRSTSESTAALGCLVKDYFPEPVTVSWNSGALTSGVHTFPAVLQSSGLYSLSSVVTVPSSSLGTKTYTCNVDHKPSNTKVDKRVESKYGPPCPPCPAPEFLGGPSVFLFPPKPKDTLMISRTPEVTCVVVDVSQEDPEVQFNWYVDGVEVHNAKTKPREEQFNSTYRVVSVLTVLHQDWLNGKEYKCKVSNKGLPSSIEKTISKAKGQPREPQVYTLPPSQEEMTKNQVSLTCLVKGFYPSDIAVEWESNGQPENNYKTTPPVLDSDGSFFLYSRLTVDKSRWQEGNVFSCSVMHEALHNHYTQKSLSLSLGAGGGGSGGGGSGGGGSGGGGSGAPLKIQAYFNETADLPCQFANSQNISLSELVVVWQDQENLVLNEVYLGKEKFDSVHSKYMGRTSFDSDSWTLRLHNLQIKDKGLYQCIIVHKKPTGMIRIHQMNSELSVLANFSQPEIVPISNITENVYINLTCSSIHGYPEPKKMSVLLRTKNSTIEYDGVMQKSQDNVTELYDVSISLSVSFPDVTSNMTIFCILETDKTRLLSSPFSIELEDPQPPPDHIP

SEQ ID NO: 794 - protein, 774 aa, synthetic construct
  REGION 1..774: note = LAG3 R97E 97-156-sugemalimab antibody heavy chain -CD86 ECD-Q25V/F33V/H90V
ERYTVLSVGPGGLRSGRLPLQPRVQLDERGRQRGDFSLWLRPARRADAGEYRAAVHLRDRGGGGSGGGGSGGGGSGGGGSGEVQLLESGGGLVQPGGSLRLSCAASGFTFSSYAMSWVRQAPGKGLEWVSGISGSGGFTYYADSVKGRFTISRDNSKNTLYLQMNSLRAEDTAVYYCAKPPRGYNYGPFDYWGQGTLVTVSSASTKGPSVFPLAPCSRSTSESTAALGCLVKDYFPEPVTVSWNSGALTSGVHTFPAVLQSSGLYSLSSVVTVPSSSLGTKTYTCNVDHKPSNTKVDKRVESKYGPPCPPCPAPEFLGGPSVFLFPPKPKDTLMISRTPEVTCVVVDVSQEDPEVQFNWYVDGVEVHNAKTKPREEQFNSTYRVVSVLTVLHQDWLNGKEYKCKVSNKGLPSSIEKTISKAKGQPREPQVYTLPPSQEEMTKNQVSLTCLVKGFYPSDIAVEWESNGQPENNYKTTPPVLDSDGSFFLYSRLTVDKSRWQEGNVFSCSVMHEALHNHYTQKSLSLSLGAGGGGSGGGGSGGGGSGGGGSGAPLKIQAYFNETADLPCQFANSQNVSLSELVVVWQDQENLVLNEVYLGKEKFDSVHSKYMGRTSFDSDSWTLRLHNLQIKDKGLYQCIIVHKKPTGMIRIHQMNSELSVLANFSQPEIVPISNITENVYINLTCSSIHGYPEPKKMSVLLRTKNSTIEYDGVMQKSQDNVTELYDVSISLSVSFPDVTSNMTIFCILETDKTRLLSSPFSIELEDPQPPPDHIP

SEQ ID NO: 795 - protein, 774 aa, synthetic construct
  REGION 1..774: note = LAG3 R97E 97-156-sugemalimab antibody heavy chain -CD86 ECD-A13L/Q25I/F33L/H90I
ERYTVLSVGPGGLRSGRLPLQPRVQLDERGRQRGDFSLWLRPARRADAGEYRAAVHLRDRGGGGSGGGGSGGGGSGGGGSGEVQLLESGGGLVQPGGSLRLSCAASGFTFSSYAMSWVRQAPGKGLEWVSGISGSGGFTYYADSVKGRFTISRDNSKNTLYLQMNSLRAEDTAVYYCAKPPRGYNYGPFDYWGQGTLVTVSSASTKGPSVFPLAPCSRSTSESTAALGCLVKDYFPEPVTVSWNSGALTSGVHTFPAVLQSSGLYSLSSVVTVPSSSLGTKTYTCNVDHKPSNTKVDKRVESKYGPPCPPCPAPEFLGGPSVFLFPPKPKDTLMISRTPEVTCVVVDVSQEDPEVQFNWYVDGVEVHNAKTKPREEQFNSTYRVVSVLTVLHQDWLNGKEYKCKVSNKGLPSSIEKTISKAKGQPREPQVYTLPPSQEEMTKNQVSLTCLVKGFYPSDIAVEWESNGQPENNYKTTPPVLDSDGSFFLYSRLTVDKSRWQEGNVFSCSVMHEALHNHYTQKSLSLSLGAGGGGSGGGGSGGGGSGGGGSGAPLKIQAYFNETLDLPCQFANSQNISLSELVVLWQDQENLVLNEVYLGKEKFDSVHSKYMGRTSFDSDSWTLRLHNLQIKDKGLYQCIIIHKKPTGMIRIHQMNSELSVLANFSQPEIVPISNITENVYINLTCSSIHGYPEPKKMSVLLRTKNSTIEYDGVMQKSQDNVTELYDVSISLSVSFPDVTSNMTIFCILETDKTRLLSSPFSIELEDPQPPPDHIP

SEQ ID NO: 796 - protein, 774 aa, synthetic construct
  REGION 1..774: note = LAG3 R97E 97-156-sugemalimab antibody heavy chain -CD86 ECD-A13I/Q25I/F33L/H90I
ERYTVLSVGPGGLRSGRLPLQPRVQLDERGRQRGDFSLWLRPARRADAGEYRAAVHLRDRGGGGSGGGGSGGGGSGGGGSGEVQLLESGGGLVQPGGSLRLSCAASGFTFSSYAMSWVRQAPGKGLEWVSGISGSGGFTYYADSVKGRFTISRDNSKNTLYLQMNSLRAEDTAVYYCAKPPRGYNYGPFDYWGQGTLVTVSSASTKGPSVFPLAPCSRSTSESTAALGCLVKDYFPEPVTVSWNSGALTSGVHTFPAVLQSSGLYSLSSVVTVPSSSLGTKTYTCNVDHKPSNTKVDKRVESKYGPPCPPCPAPEFLGGPSVFLFPPKPKDTLMISRTPEVTCVVVDVSQEDPEVQFNWYVDGVEVHNAKTKPREEQFNSTYRVVSVLTVLHQDWLNGKEYKCKVSNKGLPSSIEKTISKAKGQPREPQVYTLPPSQEEMTKNQVSLTCLVKGFYPSDIAVEWESNGQPENNYKTTPPVLDSDGSFFLYSRLTVDKSRWQEGNVFSCSVMHEALHNHYTQKSLSLSLGAGGGGSGGGGSGGGGSGGGGSGAPLKIQAYFNETIDLPCQFANSQNISLSELVVLWQDQENLVLNEVYLGKEKFDSVHSKYMGRTSFDSDSWTLRLHNLQIKDKGLYQCIIIHKKPTGMIRIHQMNSELSVLANFSQPEIVPISNITENVYINLTCSSIHGYPEPKKMSVLLRTKNSTIEYDGVMQKSQDNVTELYDVSISLSVSFPDVTSNMTIFCILETDKTRLLSSPFSIELEDPQPPPDHIP

SEQ ID NO: 797 - protein, 774 aa, synthetic construct
  REGION 1..774: note = LAG3 R97E 97-156-sugemalimab antibody heavy chain -CD86 ECD-A13L/Q25V/F33L/H90I
ERYTVLSVGPGGLRSGRLPLQPRVQLDERGRQRGDFSLWLRPARRADAGEYRAAVHLRDRGGGGSGGGGSGGGGSGGGGSGEVQLLESGGGLVQPGGSLRLSCAASGFTFSSYAMSWVRQAPGKGLEWVSGISGSGGFTYYADSVKGRFTISRDNSKNTLYLQMNSLRAEDTAVYYCAKPPRGYNYGPFDYWGQGTLVTVSSASTKGPSVFPLAPCSRSTSESTAALGCLVKDYFPEPVTVSWNSGALTSGVHTFPAVLQSSGLYSLSSVVTVPSSSLGTKTYTCNVDHKPSNTKVDKRVESKYGPPCPPCPAPEFLGGPSVFLFPPKPKDTLMISRTPEVTCVVVDVSQEDPEVQFNWYVDGVEVHNAKTKPREEQFNSTYRVVSVLTVLHQDWLNGKEYKCKVSNKGLPSSIEKTISKAKGQPREPQVYTLPPSQEEMTKNQVSLTCLVKGFYPSDIAVEWESNGQPENNYKTTPPVLDSDGSFFLYSRLTVDKSRWQEGNVFSCSVMHEALHNHYTQKSLSLSLGAGGGGSGGGGSGGGGSGGGGSGAPLKIQAYFNETLDLPCQFANSQNVSLSELVVLWQDQENLVLNEVYLGKEKFDSVHSKYMGRTSFDSDSWTLRLHNLQIKDKGLYQCIIIHKKPTGMIRIHQMNSELSVLANFSQPEIVPISNITENVYINLTCSSIHGYPEPKKMSVLLRTKNSTIEYDGVMQKSQDNVTELYDVSISLSVSFPDVTSNMTIFCILETDKTRLLSSPFSIELEDPQPPPDHIP

SEQ ID NO: 798 - protein, 774 aa, synthetic construct
  REGION 1..774: note = LAG3 R97E 97-156-sugemalimab antibody heavy chain -CD86 ECD-A13I/Q25V/F33L/H90I
ERYTVLSVGPGGLRSGRLPLQPRVQLDERGRQRGDFSLWLRPARRADAGEYRAAVHLRDRGGGGSGGGGSGGGGSGGGGSGEVQLLESGGGLVQPGGSLRLSCAASGFTFSSYAMSWVRQAPGKGLEWVSGISGSGGFTYYADSVKGRFTISRDNSKNTLYLQMNSLRAEDTAVYYCAKPPRGYNYGPFDYWGQGTLVTVSSASTKGPSVFPLAPCSRSTSESTAALGCLVKDYFPEPVTVSWNSGALTSGVHTFPAVLQSSGLYSLSSVVTVPSSSLGTKTYTCNVDHKPSNTKVDKRVESKYGPPCPPCPAPEFLGGPSVFLFPPKPKDTLMISRTPEVTCVVVDVSQEDPEVQFNWYVDGVEVHNAKTKPREEQFNSTYRVVSVLTVLHQDWLNGKEYKCKVSNKGLPSSIEKTISKAKGQPREPQVYTLPPSQEEMTKNQVSLTCLVKGFYPSDIAVEWESNGQPENNYKTTPPVLDSDGSFFLYSRLTVDKSRWQEGNVFSCSVMHEALHNHYTQKSLSLSLGAGGGGSGGGGSGGGGSGGGGSGAPLKIQAYFNETIDLPCQFANSQNVSLSELVVLWQDQENLVLNEVYLGKEKFDSVHSKYMGRTSFDSDSWTLRLHNLQIKDKGLYQCIIIHKKPTGMIRIHQMNSELSVLANFSQPEIVPISNITENVYINLTCSSIHGYPEPKKMSVLLRTKNSTIEYDGVMQKSQDNVTELYDVSISLSVSFPDVTSNMTIFCILETDKTRLLSSPFSIELEDPQPPPDHIP

SEQ ID NO: 799 - protein, 774 aa, synthetic construct
  REGION 1..774: note = LAG3 R97E 97-156-sugemalimab antibody heavy chain -CD86 ECD-Q25I/F33L/I89L/H90I
ERYTVLSVGPGGLRSGRLPLQPRVQLDERGRQRGDFSLWLRPARRADAGEYRAAVHLRDRGGGGSGGGGSGGGGSGGGGSGEVQLLESGGGLVQPGGSLRLSCAASGFTFSSYAMSWVRQAPGKGLEWVSGISGSGGFTYYADSVKGRFTISRDNSKNTLYLQMNSLRAEDTAVYYCAKPPRGYNYGPFDYWGQGTLVTVSSASTKGPSVFPLAPCSRSTSESTAALGCLVKDYFPEPVTVSWNSGALTSGVHTFPAVLQSSGLYSLSSVVTVPSSSLGTKTYTCNVDHKPSNTKVDKRVESKYGPPCPPCPAPEFLGGPSVFLFPPKPKDTLMISRTPEVTCVVVDVSQEDPEVQFNWYVDGVEVHNAKTKPREEQFNSTYRVVSVLTVLHQDWLNGKEYKCKVSNKGLPSSIEKTISKAKGQPREPQVYTLPPSQEEMTKNQVSLTCLVKGFYPSDIAVEWESNGQPENNYKTTPPVLDSDGSFFLYSRLTVDKSRWQEGNVFSCSVMHEALHNHYTQKSLSLSLGAGGGGSGGGGSGGGGSGGGGSGAPLKIQAYFNETADLPCQFANSQNISLSELVVLWQDQENLVLNEVYLGKEKFDSVHSKYMGRTSFDSDSWTLRLHNLQIKDKGLYQCILIHKKPTGMIRIHQMNSELSVLANFSQPEIVPISNITENVYINLTCSSIHGYPEPKKMSVLLRTKNSTIEYDGVMQKSQDNVTELYDVSISLSVSFPDVTSNMTIFCILETDKTRLLSSPFSIELEDPQPPPDHIP

SEQ ID NO: 800 - protein, 774 aa, synthetic construct
  REGION 1..774: note = LAG3 R97E 97-156-sugemalimab antibody heavy chain -CD86 ECD-Q25I/F33L/M60R/H90I
ERYTVLSVGPGGLRSGRLPLQPRVQLDERGRQRGDFSLWLRPARRADAGEYRAAVHLRDRGGGGSGGGGSGGGGSGGGGSGEVQLLESGGGLVQPGGSLRLSCAASGFTFSSYAMSWVRQAPGKGLEWVSGISGSGGFTYYADSVKGRFTISRDNSKNTLYLQMNSLRAEDTAVYYCAKPPRGYNYGPFDYWGQGTLVTVSSASTKGPSVFPLAPCSRSTSESTAALGCLVKDYFPEPVTVSWNSGALTSGVHTFPAVLQSSGLYSLSSVVTVPSSSLGTKTYTCNVDHKPSNTKVDKRVESKYGPPCPPCPAPEFLGGPSVFLFPPKPKDTLMISRTPEVTCVVVDVSQEDPEVQFNWYVDGVEVHNAKTKPREEQFNSTYRVVSVLTVLHQDWLNGKEYKCKVSNKGLPSSIEKTISKAKGQPREPQVYTLPPSQEEMTKNQVSLTCLVKGFYPSDIAVEWESNGQPENNYKTTPPVLDSDGSFFLYSRLTVDKSRWQEGNVFSCSVMHEALHNHYTQKSLSLSLGAGGGGSGGGGSGGGGSGGGGSGAPLKIQAYFNETADLPCQFANSQNISLSELVVLWQDQENLVLNEVYLGKEKFDSVHSKYRGRTSFDSDSWTLRLHNLQIKDKGLYQCIIIHKKPTGMIRIHQMNSELSVLANFSQPEIVPISNITENVYINLTCSSIHGYPEPKKMSVLLRTKNSTIEYDGVMQKSQDNVTELYDVSISLSVSFPDVTSNMTIFCILETDKTRLLSSPFSIELEDPQPPPDHIP

SEQ ID NO: 801 - protein, 774 aa, synthetic construct
  REGION 1..774: note = LAG3 R97E 97-156-sugemalimab antibody heavy chain -CD86 ECD-Q25V/F33L/I89L/H90I
ERYTVLSVGPGGLRSGRLPLQPRVQLDERGRQRGDFSLWLRPARRADAGEYRAAVHLRDRGGGGSGGGGSGGGGSGGGGSGEVQLLESGGGLVQPGGSLRLSCAASGFTFSSYAMSWVRQAPGKGLEWVSGISGSGGFTYYADSVKGRFTISRDNSKNTLYLQMNSLRAEDTAVYYCAKPPRGYNYGPFDYWGQGTLVTVSSASTKGPSVFPLAPCSRSTSESTAALGCLVKDYFPEPVTVSWNSGALTSGVHTFPAVLQSSGLYSLSSVVTVPSSSLGTKTYTCNVDHKPSNTKVDKRVESKYGPPCPPCPAPEFLGGPSVFLFPPKPKDTLMISRTPEVTCVVVDVSQEDPEVQFNWYVDGVEVHNAKTKPREEQFNSTYRVVSVLTVLHQDWLNGKEYKCKVSNKGLPSSIEKTISKAKGQPREPQVYTLPPSQEEMTKNQVSLTCLVKGFYPSDIAVEWESNGQPENNYKTTPPVLDSDGSFFLYSRLTVDKSRWQEGNVFSCSVMHEALHNHYTQKSLSLSLGAGGGGSGGGGSGGGGSGGGGSGAPLKIQAYFNETADLPCQFANSQNVSLSELVVLWQDQENLVLNEVYLGKEKFDSVHSKYMGRTSFDSDSWTLRLHNLQIKDKGLYQCILIHKKPTGMIRIHQMNSELSVLANFSQPEIVPISNITENVYINLTCSSIHGYPEPKKMSVLLRTKNSTIEYDGVMQKSQDNVTELYDVSISLSVSFPDVTSNMTIFCILETDKTRLLSSPFSIELEDPQPPPDHIP

SEQ ID NO: 802 - protein, 774 aa, synthetic construct
  REGION 1..774: note = LAG3 R97E 97-156-sugemalimab antibody heavy chain -CD86 ECD-Q25V/F33L/M60R/H90I
ERYTVLSVGPGGLRSGRLPLQPRVQLDERGRQRGDFSLWLRPARRADAGEYRAAVHLRDRGGGGSGGGGSGGGGSGGGGSGEVQLLESGGGLVQPGGSLRLSCAASGFTFSSYAMSWVRQAPGKGLEWVSGISGSGGFTYYADSVKGRFTISRDNSKNTLYLQMNSLRAEDTAVYYCAKPPRGYNYGPFDYWGQGTLVTVSSASTKGPSVFPLAPCSRSTSESTAALGCLVKDYFPEPVTVSWNSGALTSGVHTFPAVLQSSGLYSLSSVVTVPSSSLGTKTYTCNVDHKPSNTKVDKRVESKYGPPCPPCPAPEFLGGPSVFLFPPKPKDTLMISRTPEVTCVVVDVSQEDPEVQFNWYVDGVEVHNAKTKPREEQFNSTYRVVSVLTVLHQDWLNGKEYKCKVSNKGLPSSIEKTISKAKGQPREPQVYTLPPSQEEMTKNQVSLTCLVKGFYPSDIAVEWESNGQPENNYKTTPPVLDSDGSFFLYSRLTVDKSRWQEGNVFSCSVMHEALHNHYTQKSLSLSLGAGGGGSGGGGSGGGGSGGGGSGAPLKIQAYFNETADLPCQFANSQNVSLSELVVLWQDQENLVLNEVYLGKEKFDSVHSKYRGRTSFDSDSWTLRLHNLQIKDKGLYQCIIIHKKPTGMIRIHQMNSELSVLANFSQPEIVPISNITENVYINLTCSSIHGYPEPKKMSVLLRTKNSTIEYDGVMQKSQDNVTELYDVSISLSVSFPDVTSNMTIFCILETDKTRLLSSPFSIELEDPQPPPDHIP

SEQ ID NO: 803 - protein, 774 aa, synthetic construct
  REGION 1..774: note = LAG3 R97E 97-156-sugemalimab antibody heavy chain -CD86 ECD-Q25F/F33L/H90I
ERYTVLSVGPGGLRSGRLPLQPRVQLDERGRQRGDFSLWLRPARRADAGEYRAAVHLRDRGGGGSGGGGSGGGGSGGGGSGEVQLLESGGGLVQPGGSLRLSCAASGFTFSSYAMSWVRQAPGKGLEWVSGISGSGGFTYYADSVKGRFTISRDNSKNTLYLQMNSLRAEDTAVYYCAKPPRGYNYGPFDYWGQGTLVTVSSASTKGPSVFPLAPCSRSTSESTAALGCLVKDYFPEPVTVSWNSGALTSGVHTFPAVLQSSGLYSLSSVVTVPSSSLGTKTYTCNVDHKPSNTKVDKRVESKYGPPCPPCPAPEFLGGPSVFLFPPKPKDTLMISRTPEVTCVVVDVSQEDPEVQFNWYVDGVEVHNAKTKPREEQFNSTYRVVSVLTVLHQDWLNGKEYKCKVSNKGLPSSIEKTISKAKGQPREPQVYTLPPSQEEMTKNQVSLTCLVKGFYPSDIAVEWESNGQPENNYKTTPPVLDSDGSFFLYSRLTVDKSRWQEGNVFSCSVMHEALHNHYTQKSLSLSLGAGGGGSGGGGSGGGGSGGGGSGAPLKIQAYFNETADLPCQFANSQNFSLSELVVLWQDQENLVLNEVYLGKEKFDSVHSKYMGRTSFDSDSWTLRLHNLQIKDKGLYQCIIIHKKPTGMIRIHQMNSELSVLANFSQPEIVPISNITENVYINLTCSSIHGYPEPKKMSVLLRTKNSTIEYDGVMQKSQDNVTELYDVSISLSVSFPDVTSNMTIFCILETDKTRLLSSPFSIELEDPQPPPDHIP

SEQ ID NO: 804 - protein, 774 aa, synthetic construct
  REGION 1..774: note = LAG3 R97E 97-156-sugemalimab antibody heavy chain -CD86 ECD-Q25I/F33L/H90F
ERYTVLSVGPGGLRSGRLPLQPRVQLDERGRQRGDFSLWLRPARRADAGEYRAAVHLRDRGGGGSGGGGSGGGGSGGGGSGEVQLLESGGGLVQPGGSLRLSCAASGFTFSSYAMSWVRQAPGKGLEWVSGISGSGGFTYYADSVKGRFTISRDNSKNTLYLQMNSLRAEDTAVYYCAKPPRGYNYGPFDYWGQGTLVTVSSASTKGPSVFPLAPCSRSTSESTAALGCLVKDYFPEPVTVSWNSGALTSGVHTFPAVLQSSGLYSLSSVVTVPSSSLGTKTYTCNVDHKPSNTKVDKRVESKYGPPCPPCPAPEFLGGPSVFLFPPKPKDTLMISRTPEVTCVVVDVSQEDPEVQFNWYVDGVEVHNAKTKPREEQFNSTYRVVSVLTVLHQDWLNGKEYKCKVSNKGLPSSIEKTISKAKGQPREPQVYTLPPSQEEMTKNQVSLTCLVKGFYPSDIAVEWESNGQPENNYKTTPPVLDSDGSFFLYSRLTVDKSRWQEGNVFSCSVMHEALHNHYTQKSLSLSLGAGGGGSGGGGSGGGGSGGGGSGAPLKIQAYFNETADLPCQFANSQNISLSELVVLWQDQENLVLNEVYLGKEKFDSVHSKYMGRTSFDSDSWTLRLHNLQIKDKGLYQCIIFHKKPTGMIRIHQMNSELSVLANFSQPEIVPISNITENVYINLTCSSIHGYPEPKKMSVLLRTKNSTIEYDGVMQKSQDNVTELYDVSISLSVSFPDVTSNMTIFCILETDKTRLLSSPFSIELEDPQPPPDHIP

SEQ ID NO: 805 - protein, 774 aa, synthetic construct
  REGION 1..774: note = LAG3 R97E 97-156-sugemalimab antibody heavy chain -CD86 ECD-Q25I/F33A/H90I
ERYTVLSVGPGGLRSGRLPLQPRVQLDERGRQRGDFSLWLRPARRADAGEYRAAVHLRDRGGGGSGGGGSGGGGSGGGGSGEVQLLESGGGLVQPGGSLRLSCAASGFTFSSYAMSWVRQAPGKGLEWVSGISGSGGFTYYADSVKGRFTISRDNSKNTLYLQMNSLRAEDTAVYYCAKPPRGYNYGPFDYWGQGTLVTVSSASTKGPSVFPLAPCSRSTSESTAALGCLVKDYFPEPVTVSWNSGALTSGVHTFPAVLQSSGLYSLSSVVTVPSSSLGTKTYTCNVDHKPSNTKVDKRVESKYGPPCPPCPAPEFLGGPSVFLFPPKPKDTLMISRTPEVTCVVVDVSQEDPEVQFNWYVDGVEVHNAKTKPREEQFNSTYRVVSVLTVLHQDWLNGKEYKCKVSNKGLPSSIEKTISKAKGQPREPQVYTLPPSQEEMTKNQVSLTCLVKGFYPSDIAVEWESNGQPENNYKTTPPVLDSDGSFFLYSRLTVDKSRWQEGNVFSCSVMHEALHNHYTQKSLSLSLGAGGGGSGGGGSGGGGSGGGGSGAPLKIQAYFNETADLPCQFANSQNISLSELVVAWQDQENLVLNEVYLGKEKFDSVHSKYMGRTSFDSDSWTLRLHNLQIKDKGLYQCIIIHKKPTGMIRIHQMNSELSVLANFSQPEIVPISNITENVYINLTCSSIHGYPEPKKMSVLLRTKNSTIEYDGVMQKSQDNVTELYDVSISLSVSFPDVTSNMTIFCILETDKTRLLSSPFSIELEDPQPPPDHIP

SEQ ID NO: 806 - protein, 774 aa, synthetic construct
  REGION 1..774: note = LAG3 R97E 97-156-sugemalimab antibody heavy chain -CD86 ECD-Q25I/H90I
ERYTVLSVGPGGLRSGRLPLQPRVQLDERGRQRGDFSLWLRPARRADAGEYRAAVHLRDRGGGGSGGGGSGGGGSGGGGSGEVQLLESGGGLVQPGGSLRLSCAASGFTFSSYAMSWVRQAPGKGLEWVSGISGSGGFTYYADSVKGRFTISRDNSKNTLYLQMNSLRAEDTAVYYCAKPPRGYNYGPFDYWGQGTLVTVSSASTKGPSVFPLAPCSRSTSESTAALGCLVKDYFPEPVTVSWNSGALTSGVHTFPAVLQSSGLYSLSSVVTVPSSSLGTKTYTCNVDHKPSNTKVDKRVESKYGPPCPPCPAPEFLGGPSVFLFPPKPKDTLMISRTPEVTCVVVDVSQEDPEVQFNWYVDGVEVHNAKTKPREEQFNSTYRVVSVLTVLHQDWLNGKEYKCKVSNKGLPSSIEKTISKAKGQPREPQVYTLPPSQEEMTKNQVSLTCLVKGFYPSDIAVEWESNGQPENNYKTTPPVLDSDGSFFLYSRLTVDKSRWQEGNVFSCSVMHEALHNHYTQKSLSLSLGAGGGGSGGGGSGGGGSGGGGSGAPLKIQAYFNETADLPCQFANSQNISLSELVVFWQDQENLVLNEVYLGKEKFDSVHSKYMGRTSFDSDSWTLRLHNLQIKDKGLYQCIIIHKKPTGMIRIHQMNSELSVLANFSQPEIVPISNITENVYINLTCSSIHGYPEPKKMSVLLRTKNSTIEYDGVMQKSQDNVTELYDVSISLSVSFPDVTSNMTIFCILETDKTRLLSSPFSIELEDPQPPPDHIP

SEQ ID NO: 807 - protein, 774 aa, synthetic construct
  REGION 1..774: note = LAG3 R97E 97-156-sugemalimab antibody heavy chain -CD86 ECD-Q25V/H90V
ERYTVLSVGPGGLRSGRLPLQPRVQLDERGRQRGDFSLWLRPARRADAGEYRAAVHLRDRGGGGSGGGGSGGGGSGGGGSGEVQLLESGGGLVQPGGSLRLSCAASGFTFSSYAMSWVRQAPGKGLEWVSGISGSGGFTYYADSVKGRFTISRDNSKNTLYLQMNSLRAEDTAVYYCAKPPRGYNYGPFDYWGQGTLVTVSSASTKGPSVFPLAPCSRSTSESTAALGCLVKDYFPEPVTVSWNSGALTSGVHTFPAVLQSSGLYSLSSVVTVPSSSLGTKTYTCNVDHKPSNTKVDKRVESKYGPPCPPCPAPEFLGGPSVFLFPPKPKDTLMISRTPEVTCVVVDVSQEDPEVQFNWYVDGVEVHNAKTKPREEQFNSTYRVVSVLTVLHQDWLNGKEYKCKVSNKGLPSSIEKTISKAKGQPREPQVYTLPPSQEEMTKNQVSLTCLVKGFYPSDIAVEWESNGQPENNYKTTPPVLDSDGSFFLYSRLTVDKSRWQEGNVFSCSVMHEALHNHYTQKSLSLSLGAGGGGSGGGGSGGGGSGGGGSGAPLKIQAYFNETADLPCQFANSQNVSLSELVVFWQDQENLVLNEVYLGKEKFDSVHSKYMGRTSFDSDSWTLRLHNLQIKDKGLYQCIIVHKKPTGMIRIHQMNSELSVLANFSQPEIVPISNITENVYINLTCSSIHGYPEPKKMSVLLRTKNSTIEYDGVMQKSQDNVTELYDVSISLSVSFPDVTSNMTIFCILETDKTRLLSSPFSIELEDPQPPPDHIP

SEQ ID NO: 808 - protein, 774 aa, synthetic construct
  REGION 1..774: note = LAG3 R97E 97-156-sugemalimab antibody heavy chain -CD86 ECD-Q25V/H90I
ERYTVLSVGPGGLRSGRLPLQPRVQLDERGRQRGDFSLWLRPARRADAGEYRAAVHLRDRGGGGSGGGGSGGGGSGGGGSGEVQLLESGGGLVQPGGSLRLSCAASGFTFSSYAMSWVRQAPGKGLEWVSGISGSGGFTYYADSVKGRFTISRDNSKNTLYLQMNSLRAEDTAVYYCAKPPRGYNYGPFDYWGQGTLVTVSSASTKGPSVFPLAPCSRSTSESTAALGCLVKDYFPEPVTVSWNSGALTSGVHTFPAVLQSSGLYSLSSVVTVPSSSLGTKTYTCNVDHKPSNTKVDKRVESKYGPPCPPCPAPEFLGGPSVFLFPPKPKDTLMISRTPEVTCVVVDVSQEDPEVQFNWYVDGVEVHNAKTKPREEQFNSTYRVVSVLTVLHQDWLNGKEYKCKVSNKGLPSSIEKTISKAKGQPREPQVYTLPPSQEEMTKNQVSLTCLVKGFYPSDIAVEWESNGQPENNYKTTPPVLDSDGSFFLYSRLTVDKSRWQEGNVFSCSVMHEALHNHYTQKSLSLSLGAGGGGSGGGGSGGGGSGGGGSGAPLKIQAYFNETADLPCQFANSQNVSLSELVVFWQDQENLVLNEVYLGKEKFDSVHSKYMGRTSFDSDSWTLRLHNLQIKDKGLYQCIIIHKKPTGMIRIHQMNSELSVLANFSQPEIVPISNITENVYINLTCSSIHGYPEPKKMSVLLRTKNSTIEYDGVMQKSQDNVTELYDVSISLSVSFPDVTSNMTIFCILETDKTRLLSSPFSIELEDPQPPPDHIP

SEQ ID NO: 809 - protein, 774 aa, synthetic construct
  REGION 1..774: note = LAG3 R97E 97-156-sugemalimab antibody heavy chain -CD86 ECD-Q25F/H90I
ERYTVLSVGPGGLRSGRLPLQPRVQLDERGRQRGDFSLWLRPARRADAGEYRAAVHLRDRGGGGSGGGGSGGGGSGGGGSGEVQLLESGGGLVQPGGSLRLSCAASGFTFSSYAMSWVRQAPGKGLEWVSGISGSGGFTYYADSVKGRFTISRDNSKNTLYLQMNSLRAEDTAVYYCAKPPRGYNYGPFDYWGQGTLVTVSSASTKGPSVFPLAPCSRSTSESTAALGCLVKDYFPEPVTVSWNSGALTSGVHTFPAVLQSSGLYSLSSVVTVPSSSLGTKTYTCNVDHKPSNTKVDKRVESKYGPPCPPCPAPEFLGGPSVFLFPPKPKDTLMISRTPEVTCVVVDVSQEDPEVQFNWYVDGVEVHNAKTKPREEQFNSTYRVVSVLTVLHQDWLNGKEYKCKVSNKGLPSSIEKTISKAKGQPREPQVYTLPPSQEEMTKNQVSLTCLVKGFYPSDIAVEWESNGQPENNYKTTPPVLDSDGSFFLYSRLTVDKSRWQEGNVFSCSVMHEALHNHYTQKSLSLSLGAGGGGSGGGGSGGGGSGGGGSGAPLKIQAYFNETADLPCQFANSQNFSLSELVVFWQDQENLVLNEVYLGKEKFDSVHSKYMGRTSFDSDSWTLRLHNLQIKDKGLYQCIIIHKKPTGMIRIHQMNSELSVLANFSQPEIVPISNITENVYINLTCSSIHGYPEPKKMSVLLRTKNSTIEYDGVMQKSQDNVTELYDVSISLSVSFPDVTSNMTIFCILETDKTRLLSSPFSIELEDPQPPPDHIP

SEQ ID NO: 810 - protein, 774 aa, synthetic construct
  REGION 1..774: note = LAG3 R97E 97-156-sugemalimab antibody heavy chain -CD86 ECD-Q25F/H90V
ERYTVLSVGPGGLRSGRLPLQPRVQLDERGRQRGDFSLWLRPARRADAGEYRAAVHLRDRGGGGSGGGGSGGGGSGGGGSGEVQLLESGGGLVQPGGSLRLSCAASGFTFSSYAMSWVRQAPGKGLEWVSGISGSGGFTYYADSVKGRFTISRDNSKNTLYLQMNSLRAEDTAVYYCAKPPRGYNYGPFDYWGQGTLVTVSSASTKGPSVFPLAPCSRSTSESTAALGCLVKDYFPEPVTVSWNSGALTSGVHTFPAVLQSSGLYSLSSVVTVPSSSLGTKTYTCNVDHKPSNTKVDKRVESKYGPPCPPCPAPEFLGGPSVFLFPPKPKDTLMISRTPEVTCVVVDVSQEDPEVQFNWYVDGVEVHNAKTKPREEQFNSTYRVVSVLTVLHQDWLNGKEYKCKVSNKGLPSSIEKTISKAKGQPREPQVYTLPPSQEEMTKNQVSLTCLVKGFYPSDIAVEWESNGQPENNYKTTPPVLDSDGSFFLYSRLTVDKSRWQEGNVFSCSVMHEALHNHYTQKSLSLSLGAGGGGSGGGGSGGGGSGGGGSGAPLKIQAYFNETADLPCQFANSQNFSLSELVVFWQDQENLVLNEVYLGKEKFDSVHSKYMGRTSFDSDSWTLRLHNLQIKDKGLYQCIIVHKKPTGMIRIHQMNSELSVLANFSQPEIVPISNITENVYINLTCSSIHGYPEPKKMSVLLRTKNSTIEYDGVMQKSQDNVTELYDVSISLSVSFPDVTSNMTIFCILETDKTRLLSSPFSIELEDPQPPPDHIP

SEQ ID NO: 811 - protein, 774 aa, synthetic construct
  REGION 1..774: note = LAG3 R97E 97-156-sugemalimab antibody heavy chain -CD86 ECD-A13F/Q25I/F33L/H90I
ERYTVLSVGPGGLRSGRLPLQPRVQLDERGRQRGDFSLWLRPARRADAGEYRAAVHLRDRGGGGSGGGGSGGGGSGGGGSGEVQLLESGGGLVQPGGSLRLSCAASGFTFSSYAMSWVRQAPGKGLEWVSGISGSGGFTYYADSVKGRFTISRDNSKNTLYLQMNSLRAEDTAVYYCAKPPRGYNYGPFDYWGQGTLVTVSSASTKGPSVFPLAPCSRSTSESTAALGCLVKDYFPEPVTVSWNSGALTSGVHTFPAVLQSSGLYSLSSVVTVPSSSLGTKTYTCNVDHKPSNTKVDKRVESKYGPPCPPCPAPEFLGGPSVFLFPPKPKDTLMISRTPEVTCVVVDVSQEDPEVQFNWYVDGVEVHNAKTKPREEQFNSTYRVVSVLTVLHQDWLNGKEYKCKVSNKGLPSSIEKTISKAKGQPREPQVYTLPPSQEEMTKNQVSLTCLVKGFYPSDIAVEWESNGQPENNYKTTPPVLDSDGSFFLYSRLTVDKSRWQEGNVFSCSVMHEALHNHYTQKSLSLSLGAGGGGSGGGGSGGGGSGGGGSGAPLKIQAYFNETFDLPCQFANSQNISLSELVVLWQDQENLVLNEVYLGKEKFDSVHSKYMGRTSFDSDSWTLRLHNLQIKDKGLYQCIIIHKKPTGMIRIHQMNSELSVLANFSQPEIVPISNITENVYINLTCSSIHGYPEPKKMSVLLRTKNSTIEYDGVMQKSQDNVTELYDVSISLSVSFPDVTSNMTIFCILETDKTRLLSSPFSIELEDPQPPPDHIP

SEQ ID NO: 812 - protein, 774 aa, synthetic construct
  REGION 1..774: note = LAG3 R97E 97-156-sugemalimab antibody heavy chain -CD86 ECD-A13M/Q25I/F33L/H90I
ERYTVLSVGPGGLRSGRLPLQPRVQLDERGRQRGDFSLWLRPARRADAGEYRAAVHLRDRGGGGSGGGGSGGGGSGGGGSGEVQLLESGGGLVQPGGSLRLSCAASGFTFSSYAMSWVRQAPGKGLEWVSGISGSGGFTYYADSVKGRFTISRDNSKNTLYLQMNSLRAEDTAVYYCAKPPRGYNYGPFDYWGQGTLVTVSSASTKGPSVFPLAPCSRSTSESTAALGCLVKDYFPEPVTVSWNSGALTSGVHTFPAVLQSSGLYSLSSVVTVPSSSLGTKTYTCNVDHKPSNTKVDKRVESKYGPPCPPCPAPEFLGGPSVFLFPPKPKDTLMISRTPEVTCVVVDVSQEDPEVQFNWYVDGVEVHNAKTKPREEQFNSTYRVVSVLTVLHQDWLNGKEYKCKVSNKGLPSSIEKTISKAKGQPREPQVYTLPPSQEEMTKNQVSLTCLVKGFYPSDIAVEWESNGQPENNYKTTPPVLDSDGSFFLYSRLTVDKSRWQEGNVFSCSVMHEALHNHYTQKSLSLSLGAGGGGSGGGGSGGGGSGGGGSGAPLKIQAYFNETMDLPCQFANSQNISLSELVVLWQDQENLVLNEVYLGKEKFDSVHSKYMGRTSFDSDSWTLRLHNLQIKDKGLYQCIIIHKKPTGMIRIHQMNSELSVLANFSQPEIVPISNITENVYINLTCSSIHGYPEPKKMSVLLRTKNSTIEYDGVMQKSQDNVTELYDVSISLSVSFPDVTSNMTIFCILETDKTRLLSSPFSIELEDPQPPPDHIP

SEQ ID NO: 813 - protein, 774 aa, synthetic construct
  REGION 1..774: note = LAG3 R97E 97-156-sugemalimab antibody heavy chain -CD86 ECD-Q25A/F33L/H90I
ERYTVLSVGPGGLRSGRLPLQPRVQLDERGRQRGDFSLWLRPARRADAGEYRAAVHLRDRGGGGSGGGGSGGGGSGGGGSGEVQLLESGGGLVQPGGSLRLSCAASGFTFSSYAMSWVRQAPGKGLEWVSGISGSGGFTYYADSVKGRFTISRDNSKNTLYLQMNSLRAEDTAVYYCAKPPRGYNYGPFDYWGQGTLVTVSSASTKGPSVFPLAPCSRSTSESTAALGCLVKDYFPEPVTVSWNSGALTSGVHTFPAVLQSSGLYSLSSVVTVPSSSLGTKTYTCNVDHKPSNTKVDKRVESKYGPPCPPCPAPEFLGGPSVFLFPPKPKDTLMISRTPEVTCVVVDVSQEDPEVQFNWYVDGVEVHNAKTKPREEQFNSTYRVVSVLTVLHQDWLNGKEYKCKVSNKGLPSSIEKTISKAKGQPREPQVYTLPPSQEEMTKNQVSLTCLVKGFYPSDIAVEWESNGQPENNYKTTPPVLDSDGSFFLYSRLTVDKSRWQEGNVFSCSVMHEALHNHYTQKSLSLSLGAGGGGSGGGGSGGGGSGGGGSGAPLKIQAYFNETADLPCQFANSQNASLSELVVLWQDQENLVLNEVYLGKEKFDSVHSKYMGRTSFDSDSWTLRLHNLQIKDKGLYQCIIIHKKPTGMIRIHQMNSELSVLANFSQPEIVPISNITENVYINLTCSSIHGYPEPKKMSVLLRTKNSTIEYDGVMQKSQDNVTELYDVSISLSVSFPDVTSNMTIFCILETDKTRLLSSPFSIELEDPQPPPDHIP

SEQ ID NO: 814 - protein, 774 aa, synthetic construct
  REGION 1..774: note = LAG3 R97E 97-156-sugemalimab antibody heavy chain -CD86 ECD-Q25M/F33L/H90I
ERYTVLSVGPGGLRSGRLPLQPRVQLDERGRQRGDFSLWLRPARRADAGEYRAAVHLRDRGGGGSGGGGSGGGGSGGGGSGEVQLLESGGGLVQPGGSLRLSCAASGFTFSSYAMSWVRQAPGKGLEWVSGISGSGGFTYYADSVKGRFTISRDNSKNTLYLQMNSLRAEDTAVYYCAKPPRGYNYGPFDYWGQGTLVTVSSASTKGPSVFPLAPCSRSTSESTAALGCLVKDYFPEPVTVSWNSGALTSGVHTFPAVLQSSGLYSLSSVVTVPSSSLGTKTYTCNVDHKPSNTKVDKRVESKYGPPCPPCPAPEFLGGPSVFLFPPKPKDTLMISRTPEVTCVVVDVSQEDPEVQFNWYVDGVEVHNAKTKPREEQFNSTYRVVSVLTVLHQDWLNGKEYKCKVSNKGLPSSIEKTISKAKGQPREPQVYTLPPSQEEMTKNQVSLTCLVKGFYPSDIAVEWESNGQPENNYKTTPPVLDSDGSFFLYSRLTVDKSRWQEGNVFSCSVMHEALHNHYTQKSLSLSLGAGGGGSGGGGSGGGGSGGGGSGAPLKIQAYFNETADLPCQFANSQNMSLSELVVLWQDQENLVLNEVYLGKEKFDSVHSKYMGRTSFDSDSWTLRLHNLQIKDKGLYQCIIIHKKPTGMIRIHQMNSELSVLANFSQPEIVPISNITENVYINLTCSSIHGYPEPKKMSVLLRTKNSTIEYDGVMQKSQDNVTELYDVSISLSVSFPDVTSNMTIFCILETDKTRLLSSPFSIELEDPQPPPDHIP

SEQ ID NO: 815 - protein, 774 aa, synthetic construct
  REGION 1..774: note = LAG3 R97E 97-156-sugemalimab antibody heavy chain -CD86 ECD-Q25I/F33M/H90I
ERYTVLSVGPGGLRSGRLPLQPRVQLDERGRQRGDFSLWLRPARRADAGEYRAAVHLRDRGGGGSGGGGSGGGGSGGGGSGEVQLLESGGGLVQPGGSLRLSCAASGFTFSSYAMSWVRQAPGKGLEWVSGISGSGGFTYYADSVKGRFTISRDNSKNTLYLQMNSLRAEDTAVYYCAKPPRGYNYGPFDYWGQGTLVTVSSASTKGPSVFPLAPCSRSTSESTAALGCLVKDYFPEPVTVSWNSGALTSGVHTFPAVLQSSGLYSLSSVVTVPSSSLGTKTYTCNVDHKPSNTKVDKRVESKYGPPCPPCPAPEFLGGPSVFLFPPKPKDTLMISRTPEVTCVVVDVSQEDPEVQFNWYVDGVEVHNAKTKPREEQFNSTYRVVSVLTVLHQDWLNGKEYKCKVSNKGLPSSIEKTISKAKGQPREPQVYTLPPSQEEMTKNQVSLTCLVKGFYPSDIAVEWESNGQPENNYKTTPPVLDSDGSFFLYSRLTVDKSRWQEGNVFSCSVMHEALHNHYTQKSLSLSLGAGGGGSGGGGSGGGGSGGGGSGAPLKIQAYFNETADLPCQFANSQNISLSELVVMWQDQENLVLNEVYLGKEKFDSVHSKYMGRTSFDSDSWTLRLHNLQIKDKGLYQCIIIHKKPTGMIRIHQMNSELSVLANFSQPEIVPISNITENVYINLTCSSIHGYPEPKKMSVLLRTKNSTIEYDGVMQKSQDNVTELYDVSISLSVSFPDVTSNMTIFCILETDKTRLLSSPFSIELEDPQPPPDHIP

SEQ ID NO: 816 - protein, 774 aa, synthetic construct
  REGION 1..774: note = LAG3 R97E 97-156-sugemalimab antibody heavy chain -CD86 ECD-Q25I/F33L/I89V/H90I
ERYTVLSVGPGGLRSGRLPLQPRVQLDERGRQRGDFSLWLRPARRADAGEYRAAVHLRDRGGGGSGGGGSGGGGSGGGGSGEVQLLESGGGLVQPGGSLRLSCAASGFTFSSYAMSWVRQAPGKGLEWVSGISGSGGFTYYADSVKGRFTISRDNSKNTLYLQMNSLRAEDTAVYYCAKPPRGYNYGPFDYWGQGTLVTVSSASTKGPSVFPLAPCSRSTSESTAALGCLVKDYFPEPVTVSWNSGALTSGVHTFPAVLQSSGLYSLSSVVTVPSSSLGTKTYTCNVDHKPSNTKVDKRVESKYGPPCPPCPAPEFLGGPSVFLFPPKPKDTLMISRTPEVTCVVVDVSQEDPEVQFNWYVDGVEVHNAKTKPREEQFNSTYRVVSVLTVLHQDWLNGKEYKCKVSNKGLPSSIEKTISKAKGQPREPQVYTLPPSQEEMTKNQVSLTCLVKGFYPSDIAVEWESNGQPENNYKTTPPVLDSDGSFFLYSRLTVDKSRWQEGNVFSCSVMHEALHNHYTQKSLSLSLGAGGGGSGGGGSGGGGSGGGGSGAPLKIQAYFNETADLPCQFANSQNISLSELVVLWQDQENLVLNEVYLGKEKFDSVHSKYMGRTSFDSDSWTLRLHNLQIKDKGLYQCIVIHKKPTGMIRIHQMNSELSVLANFSQPEIVPISNITENVYINLTCSSIHGYPEPKKMSVLLRTKNSTIEYDGVMQKSQDNVTELYDVSISLSVSFPDVTSNMTIFCILETDKTRLLSSPFSIELEDPQPPPDHIP

SEQ ID NO: 817 - protein, 774 aa, synthetic construct
  REGION 1..774: note = LAG3 R97E 97-156-sugemalimab antibody heavy chain -CD86 ECD-Q25I/F33L/I89F/H90I
ERYTVLSVGPGGLRSGRLPLQPRVQLDERGRQRGDFSLWLRPARRADAGEYRAAVHLRDRGGGGSGGGGSGGGGSGGGGSGEVQLLESGGGLVQPGGSLRLSCAASGFTFSSYAMSWVRQAPGKGLEWVSGISGSGGFTYYADSVKGRFTISRDNSKNTLYLQMNSLRAEDTAVYYCAKPPRGYNYGPFDYWGQGTLVTVSSASTKGPSVFPLAPCSRSTSESTAALGCLVKDYFPEPVTVSWNSGALTSGVHTFPAVLQSSGLYSLSSVVTVPSSSLGTKTYTCNVDHKPSNTKVDKRVESKYGPPCPPCPAPEFLGGPSVFLFPPKPKDTLMISRTPEVTCVVVDVSQEDPEVQFNWYVDGVEVHNAKTKPREEQFNSTYRVVSVLTVLHQDWLNGKEYKCKVSNKGLPSSIEKTISKAKGQPREPQVYTLPPSQEEMTKNQVSLTCLVKGFYPSDIAVEWESNGQPENNYKTTPPVLDSDGSFFLYSRLTVDKSRWQEGNVFSCSVMHEALHNHYTQKSLSLSLGAGGGGSGGGGSGGGGSGGGGSGAPLKIQAYFNETADLPCQFANSQNISLSELVVLWQDQENLVLNEVYLGKEKFDSVHSKYMGRTSFDSDSWTLRLHNLQIKDKGLYQCIFIHKKPTGMIRIHQMNSELSVLANFSQPEIVPISNITENVYINLTCSSIHGYPEPKKMSVLLRTKNSTIEYDGVMQKSQDNVTELYDVSISLSVSFPDVTSNMTIFCILETDKTRLLSSPFSIELEDPQPPPDHIP

SEQ ID NO: 818 - protein, 774 aa, synthetic construct
  REGION 1..774: note = LAG3 R97E 97-156-sugemalimab antibody heavy chain -CD86 ECD-Q25I/F33L/I89M/H90I
ERYTVLSVGPGGLRSGRLPLQPRVQLDERGRQRGDFSLWLRPARRADAGEYRAAVHLRDRGGGGSGGGGSGGGGSGGGGSGEVQLLESGGGLVQPGGSLRLSCAASGFTFSSYAMSWVRQAPGKGLEWVSGISGSGGFTYYADSVKGRFTISRDNSKNTLYLQMNSLRAEDTAVYYCAKPPRGYNYGPFDYWGQGTLVTVSSASTKGPSVFPLAPCSRSTSESTAALGCLVKDYFPEPVTVSWNSGALTSGVHTFPAVLQSSGLYSLSSVVTVPSSSLGTKTYTCNVDHKPSNTKVDKRVESKYGPPCPPCPAPEFLGGPSVFLFPPKPKDTLMISRTPEVTCVVVDVSQEDPEVQFNWYVDGVEVHNAKTKPREEQFNSTYRVVSVLTVLHQDWLNGKEYKCKVSNKGLPSSIEKTISKAKGQPREPQVYTLPPSQEEMTKNQVSLTCLVKGFYPSDIAVEWESNGQPENNYKTTPPVLDSDGSFFLYSRLTVDKSRWQEGNVFSCSVMHEALHNHYTQKSLSLSLGAGGGGSGGGGSGGGGSGGGGSGAPLKIQAYFNETADLPCQFANSQNISLSELVVLWQDQENLVLNEVYLGKEKFDSVHSKYMGRTSFDSDSWTLRLHNLQIKDKGLYQCIMIHKKPTGMIRIHQMNSELSVLANFSQPEIVPISNITENVYINLTCSSIHGYPEPKKMSVLLRTKNSTIEYDGVMQKSQDNVTELYDVSISLSVSFPDVTSNMTIFCILETDKTRLLSSPFSIELEDPQPPPDHIP

SEQ ID NO: 819 - protein, 774 aa, synthetic construct
  REGION 1..774: note = LAG3 R97E 97-156-sugemalimab antibody heavy chain -CD86 ECD-Q25I/F33L/H90M
ERYTVLSVGPGGLRSGRLPLQPRVQLDERGRQRGDFSLWLRPARRADAGEYRAAVHLRDRGGGGSGGGGSGGGGSGGGGSGEVQLLESGGGLVQPGGSLRLSCAASGFTFSSYAMSWVRQAPGKGLEWVSGISGSGGFTYYADSVKGRFTISRDNSKNTLYLQMNSLRAEDTAVYYCAKPPRGYNYGPFDYWGQGTLVTVSSASTKGPSVFPLAPCSRSTSESTAALGCLVKDYFPEPVTVSWNSGALTSGVHTFPAVLQSSGLYSLSSVVTVPSSSLGTKTYTCNVDHKPSNTKVDKRVESKYGPPCPPCPAPEFLGGPSVFLFPPKPKDTLMISRTPEVTCVVVDVSQEDPEVQFNWYVDGVEVHNAKTKPREEQFNSTYRVVSVLTVLHQDWLNGKEYKCKVSNKGLPSSIEKTISKAKGQPREPQVYTLPPSQEEMTKNQVSLTCLVKGFYPSDIAVEWESNGQPENNYKTTPPVLDSDGSFFLYSRLTVDKSRWQEGNVFSCSVMHEALHNHYTQKSLSLSLGAGGGGSGGGGSGGGGSGGGGSGAPLKIQAYFNETADLPCQFANSQNISLSELVVLWQDQENLVLNEVYLGKEKFDSVHSKYMGRTSFDSDSWTLRLHNLQIKDKGLYQCIIMHKKPTGMIRIHQMNSELSVLANFSQPEIVPISNITENVYINLTCSSIHGYPEPKKMSVLLRTKNSTIEYDGVMQKSQDNVTELYDVSISLSVSFPDVTSNMTIFCILETDKTRLLSSPFSIELEDPQPPPDHIP

SEQ ID NO: 820 - protein, 774 aa, synthetic construct
  REGION 1..774: note = LAG3 R97E 97-156-sugemalimab antibody heavy chain -CD86 ECD
ERYTVLSVGPGGLRSGRLPLQPRVQLDERGRQRGDFSLWLRPARRADAGEYRAAVHLRDRGGGGSGGGGSGGGGSGGGGSGEVQLLESGGGLVQPGGSLRLSCAASGFTFSSYAMSWVRQAPGKGLEWVSGISGSGGFTYYADSVKGRFTISRDNSKNTLYLQMNSLRAEDTAVYYCAKPPRGYNYGPFDYWGQGTLVTVSSASTKGPSVFPLAPCSRSTSESTAALGCLVKDYFPEPVTVSWNSGALTSGVHTFPAVLQSSGLYSLSSVVTVPSSSLGTKTYTCNVDHKPSNTKVDKRVESKYGPPCPPCPAPEFLGGPSVFLFPPKPKDTLMISRTPEVTCVVVDVSQEDPEVQFNWYVDGVEVHNAKTKPREEQFNSTYRVVSVLTVLHQDWLNGKEYKCKVSNKGLPSSIEKTISKAKGQPREPQVYTLPPSQEEMTKNQVSLTCLVKGFYPSDIAVEWESNGQPENNYKTTPPVLDSDGSFFLYSRLTVDKSRWQEGNVFSCSVMHEALHNHYTQKSLSLSLGAGGGGSGGGGSGGGGSGGGGSGAPLKIQAYFNETADLPCQFANSQNQSLSELVVFWQDQENLVLNEVYLGKEKFDSVHSKYMGRTSFDSDSWTLRLHNLQIKDKGLYQCIIHHKKPTGMIRIHQMNSELSVLANFSQPEIVPISNITENVYINLTCSSIHGYPEPKKMSVLLRTKNSTIEYDGVMQKSQDNVTELYDVSISLSVSFPDVTSNMTIFCILETDKTRLLSSPFSIELEDPQPPPDHIP

SEQ ID NO: 821 - protein, 660 aa, synthetic construct
  REGION 1..660: note = LAG3 97-156-sugemalimab antibody heavy chain -CD86 IgV-Q25I/F33L/H90I
RRYTVLSVGPGGLRSGRLPLQPRVQLDERGRQRGDFSLWLRPARRADAGEYRAAVHLRDRGGGGSGGGGSGGGGSGGGGSGEVQLLESGGGLVQPGGSLRLSCAASGFTFSSYAMSWVRQAPGKGLEWVSGISGSGGFTYYADSVKGRFTISRDNSKNTLYLQMNSLRAEDTAVYYCAKPPRGYNYGPFDYWGQGTLVTVSSASTKGPSVFPLAPCSRSTSESTAALGCLVKDYFPEPVTVSWNSGALTSGVHTFPAVLQSSGLYSLSSVVTVPSSSLGTKTYTCNVDHKPSNTKVDKRVESKYGPPCPPCPAPEFLGGPSVFLFPPKPKDTLMISRTPEVTCVVVDVSQEDPEVQFNWYVDGVEVHNAKTKPREEQFNSTYRVVSVLTVLHQDWLNGKEYKCKVSNKGLPSSIEKTISKAKGQPREPQVYTLPPSQEEMTKNQVSLTCLVKGFYPSDIAVEWESNGQPENNYKTTPPVLDSDGSFFLYSRLTVDKSRWQEGNVFSCSVMHEALHNHYTQKSLSLSLGAGGGGSGGGGSGGGGSGGGGSGAPLKIQAYFNETADLPCQFANSQNISLSELVVLWQDQENLVLNEVYLGKEKFDSVHSKYMGRTSFDSDSWTLRLHNLQIKDKGLYQCIIIHKKPTGMIRIHQMNSELSVL

SEQ ID NO: 822 - protein, 660 aa, synthetic construct
  REGION 1..660: note = LAG3 97-156-sugemalimab antibody heavy chain -CD86 IgV-Q25V/F33L/H90I
RRYTVLSVGPGGLRSGRLPLQPRVQLDERGRQRGDFSLWLRPARRADAGEYRAAVHLRDRGGGGSGGGGSGGGGSGGGGSGEVQLLESGGGLVQPGGSLRLSCAASGFTFSSYAMSWVRQAPGKGLEWVSGISGSGGFTYYADSVKGRFTISRDNSKNTLYLQMNSLRAEDTAVYYCAKPPRGYNYGPFDYWGQGTLVTVSSASTKGPSVFPLAPCSRSTSESTAALGCLVKDYFPEPVTVSWNSGALTSGVHTFPAVLQSSGLYSLSSVVTVPSSSLGTKTYTCNVDHKPSNTKVDKRVESKYGPPCPPCPAPEFLGGPSVFLFPPKPKDTLMISRTPEVTCVVVDVSQEDPEVQFNWYVDGVEVHNAKTKPREEQFNSTYRVVSVLTVLHQDWLNGKEYKCKVSNKGLPSSIEKTISKAKGQPREPQVYTLPPSQEEMTKNQVSLTCLVKGFYPSDIAVEWESNGQPENNYKTTPPVLDSDGSFFLYSRLTVDKSRWQEGNVFSCSVMHEALHNHYTQKSLSLSLGAGGGGSGGGGSGGGGSGGGGSGAPLKIQAYFNETADLPCQFANSQNVSLSELVVLWQDQENLVLNEVYLGKEKFDSVHSKYMGRTSFDSDSWTLRLHNLQIKDKGLYQCIIIHKKPTGMIRIHQMNSELSVL

SEQ ID NO: 823 - protein, 660 aa, synthetic construct
  REGION 1..660: note = LAG3 97-156-sugemalimab antibody heavy chain -CD86 IgV-Q25I/F33V/H90I
RRYTVLSVGPGGLRSGRLPLQPRVQLDERGRQRGDFSLWLRPARRADAGEYRAAVHLRDRGGGGSGGGGSGGGGSGGGGSGEVQLLESGGGLVQPGGSLRLSCAASGFTFSSYAMSWVRQAPGKGLEWVSGISGSGGFTYYADSVKGRFTISRDNSKNTLYLQMNSLRAEDTAVYYCAKPPRGYNYGPFDYWGQGTLVTVSSASTKGPSVFPLAPCSRSTSESTAALGCLVKDYFPEPVTVSWNSGALTSGVHTFPAVLQSSGLYSLSSVVTVPSSSLGTKTYTCNVDHKPSNTKVDKRVESKYGPPCPPCPAPEFLGGPSVFLFPPKPKDTLMISRTPEVTCVVVDVSQEDPEVQFNWYVDGVEVHNAKTKPREEQFNSTYRVVSVLTVLHQDWLNGKEYKCKVSNKGLPSSIEKTISKAKGQPREPQVYTLPPSQEEMTKNQVSLTCLVKGFYPSDIAVEWESNGQPENNYKTTPPVLDSDGSFFLYSRLTVDKSRWQEGNVFSCSVMHEALHNHYTQKSLSLSLGAGGGGSGGGGSGGGGSGGGGSGAPLKIQAYFNETADLPCQFANSQNISLSELVVVWQDQENLVLNEVYLGKEKFDSVHSKYMGRTSFDSDSWTLRLHNLQIKDKGLYQCIIIHKKPTGMIRIHQMNSELSVL

SEQ ID NO: 824 - protein, 660 aa, synthetic construct
  REGION 1..660: note = LAG3 97-156-sugemalimab antibody heavy chain -CD86 IgV-Q25V/F33V/H90I
RRYTVLSVGPGGLRSGRLPLQPRVQLDERGRQRGDFSLWLRPARRADAGEYRAAVHLRDRGGGGSGGGGSGGGGSGGGGSGEVQLLESGGGLVQPGGSLRLSCAASGFTFSSYAMSWVRQAPGKGLEWVSGISGSGGFTYYADSVKGRFTISRDNSKNTLYLQMNSLRAEDTAVYYCAKPPRGYNYGPFDYWGQGTLVTVSSASTKGPSVFPLAPCSRSTSESTAALGCLVKDYFPEPVTVSWNSGALTSGVHTFPAVLQSSGLYSLSSVVTVPSSSLGTKTYTCNVDHKPSNTKVDKRVESKYGPPCPPCPAPEFLGGPSVFLFPPKPKDTLMISRTPEVTCVVVDVSQEDPEVQFNWYVDGVEVHNAKTKPREEQFNSTYRVVSVLTVLHQDWLNGKEYKCKVSNKGLPSSIEKTISKAKGQPREPQVYTLPPSQEEMTKNQVSLTCLVKGFYPSDIAVEWESNGQPENNYKTTPPVLDSDGSFFLYSRLTVDKSRWQEGNVFSCSVMHEALHNHYTQKSLSLSLGAGGGGSGGGGSGGGGSGGGGSGAPLKIQAYFNETADLPCQFANSQNVSLSELVVVWQDQENLVLNEVYLGKEKFDSVHSKYMGRTSFDSDSWTLRLHNLQIKDKGLYQCIIIHKKPTGMIRIHQMNSELSVL

SEQ ID NO: 825 - protein, 660 aa, synthetic construct
  REGION 1..660: note = LAG3 97-156-sugemalimab antibody heavy chain -CD86 IgV-Q25I/F33L/H90V
RRYTVLSVGPGGLRSGRLPLQPRVQLDERGRQRGDFSLWLRPARRADAGEYRAAVHLRDRGGGGSGGGGSGGGGSGGGGSGEVQLLESGGGLVQPGGSLRLSCAASGFTFSSYAMSWVRQAPGKGLEWVSGISGSGGFTYYADSVKGRFTISRDNSKNTLYLQMNSLRAEDTAVYYCAKPPRGYNYGPFDYWGQGTLVTVSSASTKGPSVFPLAPCSRSTSESTAALGCLVKDYFPEPVTVSWNSGALTSGVHTFPAVLQSSGLYSLSSVVTVPSSSLGTKTYTCNVDHKPSNTKVDKRVESKYGPPCPPCPAPEFLGGPSVFLFPPKPKDTLMISRTPEVTCVVVDVSQEDPEVQFNWYVDGVEVHNAKTKPREEQFNSTYRVVSVLTVLHQDWLNGKEYKCKVSNKGLPSSIEKTISKAKGQPREPQVYTLPPSQEEMTKNQVSLTCLVKGFYPSDIAVEWESNGQPENNYKTTPPVLDSDGSFFLYSRLTVDKSRWQEGNVFSCSVMHEALHNHYTQKSLSLSLGAGGGGSGGGGSGGGGSGGGGSGAPLKIQAYFNETADLPCQFANSQNISLSELVVLWQDQENLVLNEVYLGKEKFDSVHSKYMGRTSFDSDSWTLRLHNLQIKDKGLYQCIIVHKKPTGMIRIHQMNSELSVL

SEQ ID NO: 826 - protein, 660 aa, synthetic construct
  REGION 1..660: note = LAG3 97-156-sugemalimab antibody heavy chain -CD86 IgV-Q25V/F33L/H90V
RRYTVLSVGPGGLRSGRLPLQPRVQLDERGRQRGDFSLWLRPARRADAGEYRAAVHLRDRGGGGSGGGGSGGGGSGGGGSGEVQLLESGGGLVQPGGSLRLSCAASGFTFSSYAMSWVRQAPGKGLEWVSGISGSGGFTYYADSVKGRFTISRDNSKNTLYLQMNSLRAEDTAVYYCAKPPRGYNYGPFDYWGQGTLVTVSSASTKGPSVFPLAPCSRSTSESTAALGCLVKDYFPEPVTVSWNSGALTSGVHTFPAVLQSSGLYSLSSVVTVPSSSLGTKTYTCNVDHKPSNTKVDKRVESKYGPPCPPCPAPEFLGGPSVFLFPPKPKDTLMISRTPEVTCVVVDVSQEDPEVQFNWYVDGVEVHNAKTKPREEQFNSTYRVVSVLTVLHQDWLNGKEYKCKVSNKGLPSSIEKTISKAKGQPREPQVYTLPPSQEEMTKNQVSLTCLVKGFYPSDIAVEWESNGQPENNYKTTPPVLDSDGSFFLYSRLTVDKSRWQEGNVFSCSVMHEALHNHYTQKSLSLSLGAGGGGSGGGGSGGGGSGGGGSGAPLKIQAYFNETADLPCQFANSQNVSLSELVVLWQDQENLVLNEVYLGKEKFDSVHSKYMGRTSFDSDSWTLRLHNLQIKDKGLYQCIIVHKKPTGMIRIHQMNSELSVL

SEQ ID NO: 827 - protein, 660 aa, synthetic construct
  REGION 1..660: note = LAG3 97-156-sugemalimab antibody heavy chain -CD86 IgV-Q25I/F33V/H90V
RRYTVLSVGPGGLRSGRLPLQPRVQLDERGRQRGDFSLWLRPARRADAGEYRAAVHLRDRGGGGSGGGGSGGGGSGGGGSGEVQLLESGGGLVQPGGSLRLSCAASGFTFSSYAMSWVRQAPGKGLEWVSGISGSGGFTYYADSVKGRFTISRDNSKNTLYLQMNSLRAEDTAVYYCAKPPRGYNYGPFDYWGQGTLVTVSSASTKGPSVFPLAPCSRSTSESTAALGCLVKDYFPEPVTVSWNSGALTSGVHTFPAVLQSSGLYSLSSVVTVPSSSLGTKTYTCNVDHKPSNTKVDKRVESKYGPPCPPCPAPEFLGGPSVFLFPPKPKDTLMISRTPEVTCVVVDVSQEDPEVQFNWYVDGVEVHNAKTKPREEQFNSTYRVVSVLTVLHQDWLNGKEYKCKVSNKGLPSSIEKTISKAKGQPREPQVYTLPPSQEEMTKNQVSLTCLVKGFYPSDIAVEWESNGQPENNYKTTPPVLDSDGSFFLYSRLTVDKSRWQEGNVFSCSVMHEALHNHYTQKSLSLSLGAGGGGSGGGGSGGGGSGGGGSGAPLKIQAYFNETADLPCQFANSQNISLSELVVVWQDQENLVLNEVYLGKEKFDSVHSKYMGRTSFDSDSWTLRLHNLQIKDKGLYQCIIVHKKPTGMIRIHQMNSELSVL

SEQ ID NO: 828 - protein, 660 aa, synthetic construct
  REGION 1..660: note = LAG3 97-156-sugemalimab antibody heavy chain -CD86 IgV-Q25V/F33V/H90V
RRYTVLSVGPGGLRSGRLPLQPRVQLDERGRQRGDFSLWLRPARRADAGEYRAAVHLRDRGGGGSGGGGSGGGGSGGGGSGEVQLLESGGGLVQPGGSLRLSCAASGFTFSSYAMSWVRQAPGKGLEWVSGISGSGGFTYYADSVKGRFTISRDNSKNTLYLQMNSLRAEDTAVYYCAKPPRGYNYGPFDYWGQGTLVTVSSASTKGPSVFPLAPCSRSTSESTAALGCLVKDYFPEPVTVSWNSGALTSGVHTFPAVLQSSGLYSLSSVVTVPSSSLGTKTYTCNVDHKPSNTKVDKRVESKYGPPCPPCPAPEFLGGPSVFLFPPKPKDTLMISRTPEVTCVVVDVSQEDPEVQFNWYVDGVEVHNAKTKPREEQFNSTYRVVSVLTVLHQDWLNGKEYKCKVSNKGLPSSIEKTISKAKGQPREPQVYTLPPSQEEMTKNQVSLTCLVKGFYPSDIAVEWESNGQPENNYKTTPPVLDSDGSFFLYSRLTVDKSRWQEGNVFSCSVMHEALHNHYTQKSLSLSLGAGGGGSGGGGSGGGGSGGGGSGAPLKIQAYFNETADLPCQFANSQNVSLSELVVVWQDQENLVLNEVYLGKEKFDSVHSKYMGRTSFDSDSWTLRLHNLQIKDKGLYQCIIVHKKPTGMIRIHQMNSELSVL

SEQ ID NO: 829 - protein, 660 aa, synthetic construct
  REGION 1..660: note = LAG3 97-156-sugemalimab antibody heavy chain -CD86 IgV-A13L/Q25I/F33L/H90I
RRYTVLSVGPGGLRSGRLPLQPRVQLDERGRQRGDFSLWLRPARRADAGEYRAAVHLRDRGGGGSGGGGSGGGGSGGGGSGEVQLLESGGGLVQPGGSLRLSCAASGFTFSSYAMSWVRQAPGKGLEWVSGISGSGGFTYYADSVKGRFTISRDNSKNTLYLQMNSLRAEDTAVYYCAKPPRGYNYGPFDYWGQGTLVTVSSASTKGPSVFPLAPCSRSTSESTAALGCLVKDYFPEPVTVSWNSGALTSGVHTFPAVLQSSGLYSLSSVVTVPSSSLGTKTYTCNVDHKPSNTKVDKRVESKYGPPCPPCPAPEFLGGPSVFLFPPKPKDTLMISRTPEVTCVVVDVSQEDPEVQFNWYVDGVEVHNAKTKPREEQFNSTYRVVSVLTVLHQDWLNGKEYKCKVSNKGLPSSIEKTISKAKGQPREPQVYTLPPSQEEMTKNQVSLTCLVKGFYPSDIAVEWESNGQPENNYKTTPPVLDSDGSFFLYSRLTVDKSRWQEGNVFSCSVMHEALHNHYTQKSLSLSLGAGGGGSGGGGSGGGGSGGGGSGAPLKIQAYFNETLDLPCQFANSQNISLSELVVLWQDQENLVLNEVYLGKEKFDSVHSKYMGRTSFDSDSWTLRLHNLQIKDKGLYQCIIIHKKPTGMIRIHQMNSELSVL

SEQ ID NO: 830 - protein, 660 aa, synthetic construct
  REGION 1..660: note = LAG3 97-156-sugemalimab antibody heavy chain -CD86 IgV-A13I/Q25I/F33L/H90I
RRYTVLSVGPGGLRSGRLPLQPRVQLDERGRQRGDFSLWLRPARRADAGEYRAAVHLRDRGGGGSGGGGSGGGGSGGGGSGEVQLLESGGGLVQPGGSLRLSCAASGFTFSSYAMSWVRQAPGKGLEWVSGISGSGGFTYYADSVKGRFTISRDNSKNTLYLQMNSLRAEDTAVYYCAKPPRGYNYGPFDYWGQGTLVTVSSASTKGPSVFPLAPCSRSTSESTAALGCLVKDYFPEPVTVSWNSGALTSGVHTFPAVLQSSGLYSLSSVVTVPSSSLGTKTYTCNVDHKPSNTKVDKRVESKYGPPCPPCPAPEFLGGPSVFLFPPKPKDTLMISRTPEVTCVVVDVSQEDPEVQFNWYVDGVEVHNAKTKPREEQFNSTYRVVSVLTVLHQDWLNGKEYKCKVSNKGLPSSIEKTISKAKGQPREPQVYTLPPSQEEMTKNQVSLTCLVKGFYPSDIAVEWESNGQPENNYKTTPPVLDSDGSFFLYSRLTVDKSRWQEGNVFSCSVMHEALHNHYTQKSLSLSLGAGGGGSGGGGSGGGGSGGGGSGAPLKIQAYFNETIDLPCQFANSQNISLSELVVLWQDQENLVLNEVYLGKEKFDSVHSKYMGRTSFDSDSWTLRLHNLQIKDKGLYQCIIIHKKPTGMIRIHQMNSELSVL

SEQ ID NO: 831 - protein, 660 aa, synthetic construct
  REGION 1..660: note = LAG3 97-156-sugemalimab antibody heavy chain -CD86 IgV-A13L/Q25V/F33L/H90I
RRYTVLSVGPGGLRSGRLPLQPRVQLDERGRQRGDFSLWLRPARRADAGEYRAAVHLRDRGGGGSGGGGSGGGGSGGGGSGEVQLLESGGGLVQPGGSLRLSCAASGFTFSSYAMSWVRQAPGKGLEWVSGISGSGGFTYYADSVKGRFTISRDNSKNTLYLQMNSLRAEDTAVYYCAKPPRGYNYGPFDYWGQGTLVTVSSASTKGPSVFPLAPCSRSTSESTAALGCLVKDYFPEPVTVSWNSGALTSGVHTFPAVLQSSGLYSLSSVVTVPSSSLGTKTYTCNVDHKPSNTKVDKRVESKYGPPCPPCPAPEFLGGPSVFLFPPKPKDTLMISRTPEVTCVVVDVSQEDPEVQFNWYVDGVEVHNAKTKPREEQFNSTYRVVSVLTVLHQDWLNGKEYKCKVSNKGLPSSIEKTISKAKGQPREPQVYTLPPSQEEMTKNQVSLTCLVKGFYPSDIAVEWESNGQPENNYKTTPPVLDSDGSFFLYSRLTVDKSRWQEGNVFSCSVMHEALHNHYTQKSLSLSLGAGGGGSGGGGSGGGGSGGGGSGAPLKIQAYFNETLDLPCQFANSQNVSLSELVVLWQDQENLVLNEVYLGKEKFDSVHSKYMGRTSFDSDSWTLRLHNLQIKDKGLYQCIIIHKKPTGMIRIHQMNSELSVL

SEQ ID NO: 832 - protein, 660 aa, synthetic construct
  REGION 1..660: note = LAG3 97-156-sugemalimab antibody heavy chain -CD86 IgV-A13I/Q25V/F33L/H90I
RRYTVLSVGPGGLRSGRLPLQPRVQLDERGRQRGDFSLWLRPARRADAGEYRAAVHLRDRGGGGSGGGGSGGGGSGGGGSGEVQLLESGGGLVQPGGSLRLSCAASGFTFSSYAMSWVRQAPGKGLEWVSGISGSGGFTYYADSVKGRFTISRDNSKNTLYLQMNSLRAEDTAVYYCAKPPRGYNYGPFDYWGQGTLVTVSSASTKGPSVFPLAPCSRSTSESTAALGCLVKDYFPEPVTVSWNSGALTSGVHTFPAVLQSSGLYSLSSVVTVPSSSLGTKTYTCNVDHKPSNTKVDKRVESKYGPPCPPCPAPEFLGGPSVFLFPPKPKDTLMISRTPEVTCVVVDVSQEDPEVQFNWYVDGVEVHNAKTKPREEQFNSTYRVVSVLTVLHQDWLNGKEYKCKVSNKGLPSSIEKTISKAKGQPREPQVYTLPPSQEEMTKNQVSLTCLVKGFYPSDIAVEWESNGQPENNYKTTPPVLDSDGSFFLYSRLTVDKSRWQEGNVFSCSVMHEALHNHYTQKSLSLSLGAGGGGSGGGGSGGGGSGGGGSGAPLKIQAYFNETIDLPCQFANSQNVSLSELVVLWQDQENLVLNEVYLGKEKFDSVHSKYMGRTSFDSDSWTLRLHNLQIKDKGLYQCIIIHKKPTGMIRIHQMNSELSVL

SEQ ID NO: 833 - protein, 660 aa, synthetic construct
  REGION 1..660: note = LAG3 97-156-sugemalimab antibody heavy chain -CD86 IgV-Q25I/F33L/I89L/H90I
RRYTVLSVGPGGLRSGRLPLQPRVQLDERGRQRGDFSLWLRPARRADAGEYRAAVHLRDRGGGGSGGGGSGGGGSGGGGSGEVQLLESGGGLVQPGGSLRLSCAASGFTFSSYAMSWVRQAPGKGLEWVSGISGSGGFTYYADSVKGRFTISRDNSKNTLYLQMNSLRAEDTAVYYCAKPPRGYNYGPFDYWGQGTLVTVSSASTKGPSVFPLAPCSRSTSESTAALGCLVKDYFPEPVTVSWNSGALTSGVHTFPAVLQSSGLYSLSSVVTVPSSSLGTKTYTCNVDHKPSNTKVDKRVESKYGPPCPPCPAPEFLGGPSVFLFPPKPKDTLMISRTPEVTCVVVDVSQEDPEVQFNWYVDGVEVHNAKTKPREEQFNSTYRVVSVLTVLHQDWLNGKEYKCKVSNKGLPSSIEKTISKAKGQPREPQVYTLPPSQEEMTKNQVSLTCLVKGFYPSDIAVEWESNGQPENNYKTTPPVLDSDGSFFLYSRLTVDKSRWQEGNVFSCSVMHEALHNHYTQKSLSLSLGAGGGGSGGGGSGGGGSGGGGSGAPLKIQAYFNETADLPCQFANSQNISLSELVVLWQDQENLVLNEVYLGKEKFDSVHSKYMGRTSFDSDSWTLRLHNLQIKDKGLYQCILIHKKPTGMIRIHQMNSELSVL

SEQ ID NO: 834 - protein, 660 aa, synthetic construct
  REGION 1..660: note = LAG3 97-156-sugemalimab antibody heavy chain -CD86 IgV-Q25I/F33L/M60R/H90I
RRYTVLSVGPGGLRSGRLPLQPRVQLDERGRQRGDFSLWLRPARRADAGEYRAAVHLRDRGGGGSGGGGSGGGGSGGGGSGEVQLLESGGGLVQPGGSLRLSCAASGFTFSSYAMSWVRQAPGKGLEWVSGISGSGGFTYYADSVKGRFTISRDNSKNTLYLQMNSLRAEDTAVYYCAKPPRGYNYGPFDYWGQGTLVTVSSASTKGPSVFPLAPCSRSTSESTAALGCLVKDYFPEPVTVSWNSGALTSGVHTFPAVLQSSGLYSLSSVVTVPSSSLGTKTYTCNVDHKPSNTKVDKRVESKYGPPCPPCPAPEFLGGPSVFLFPPKPKDTLMISRTPEVTCVVVDVSQEDPEVQFNWYVDGVEVHNAKTKPREEQFNSTYRVVSVLTVLHQDWLNGKEYKCKVSNKGLPSSIEKTISKAKGQPREPQVYTLPPSQEEMTKNQVSLTCLVKGFYPSDIAVEWESNGQPENNYKTTPPVLDSDGSFFLYSRLTVDKSRWQEGNVFSCSVMHEALHNHYTQKSLSLSLGAGGGGSGGGGSGGGGSGGGGSGAPLKIQAYFNETADLPCQFANSQNISLSELVVLWQDQENLVLNEVYLGKEKFDSVHSKYRGRTSFDSDSWTLRLHNLQIKDKGLYQCIIIHKKPTGMIRIHQMNSELSVL

SEQ ID NO: 835 - protein, 660 aa, synthetic construct
  REGION 1..660: note = LAG3 97-156-sugemalimab antibody heavy chain -CD86 IgV-Q25V/F33L/I89L/H90I
RRYTVLSVGPGGLRSGRLPLQPRVQLDERGRQRGDFSLWLRPARRADAGEYRAAVHLRDRGGGGSGGGGSGGGGSGGGGSGEVQLLESGGGLVQPGGSLRLSCAASGFTFSSYAMSWVRQAPGKGLEWVSGISGSGGFTYYADSVKGRFTISRDNSKNTLYLQMNSLRAEDTAVYYCAKPPRGYNYGPFDYWGQGTLVTVSSASTKGPSVFPLAPCSRSTSESTAALGCLVKDYFPEPVTVSWNSGALTSGVHTFPAVLQSSGLYSLSSVVTVPSSSLGTKTYTCNVDHKPSNTKVDKRVESKYGPPCPPCPAPEFLGGPSVFLFPPKPKDTLMISRTPEVTCVVVDVSQEDPEVQFNWYVDGVEVHNAKTKPREEQFNSTYRVVSVLTVLHQDWLNGKEYKCKVSNKGLPSSIEKTISKAKGQPREPQVYTLPPSQEEMTKNQVSLTCLVKGFYPSDIAVEWESNGQPENNYKTTPPVLDSDGSFFLYSRLTVDKSRWQEGNVFSCSVMHEALHNHYTQKSLSLSLGAGGGGSGGGGSGGGGSGGGGSGAPLKIQAYFNETADLPCQFANSQNVSLSELVVLWQDQENLVLNEVYLGKEKFDSVHSKYMGRTSFDSDSWTLRLHNLQIKDKGLYQCILIHKKPTGMIRIHQMNSELSVL

SEQ ID NO: 836 - protein, 660 aa, synthetic construct
  REGION 1..660: note = LAG3 97-156-sugemalimab antibody heavy chain -CD86 IgV-Q25V/F33L/M60R/H90I
RRYTVLSVGPGGLRSGRLPLQPRVQLDERGRQRGDFSLWLRPARRADAGEYRAAVHLRDRGGGGSGGGGSGGGGSGGGGSGEVQLLESGGGLVQPGGSLRLSCAASGFTFSSYAMSWVRQAPGKGLEWVSGISGSGGFTYYADSVKGRFTISRDNSKNTLYLQMNSLRAEDTAVYYCAKPPRGYNYGPFDYWGQGTLVTVSSASTKGPSVFPLAPCSRSTSESTAALGCLVKDYFPEPVTVSWNSGALTSGVHTFPAVLQSSGLYSLSSVVTVPSSSLGTKTYTCNVDHKPSNTKVDKRVESKYGPPCPPCPAPEFLGGPSVFLFPPKPKDTLMISRTPEVTCVVVDVSQEDPEVQFNWYVDGVEVHNAKTKPREEQFNSTYRVVSVLTVLHQDWLNGKEYKCKVSNKGLPSSIEKTISKAKGQPREPQVYTLPPSQEEMTKNQVSLTCLVKGFYPSDIAVEWESNGQPENNYKTTPPVLDSDGSFFLYSRLTVDKSRWQEGNVFSCSVMHEALHNHYTQKSLSLSLGAGGGGSGGGGSGGGGSGGGGSGAPLKIQAYFNETADLPCQFANSQNVSLSELVVLWQDQENLVLNEVYLGKEKFDSVHSKYRGRTSFDSDSWTLRLHNLQIKDKGLYQCIIIHKKPTGMIRIHQMNSELSVL

SEQ ID NO: 837 - protein, 660 aa, synthetic construct
  REGION 1..660: note = LAG3 97-156-sugemalimab antibody heavy chain -CD86 IgV-Q25F/F33L/H90I
RRYTVLSVGPGGLRSGRLPLQPRVQLDERGRQRGDFSLWLRPARRADAGEYRAAVHLRDRGGGGSGGGGSGGGGSGGGGSGEVQLLESGGGLVQPGGSLRLSCAASGFTFSSYAMSWVRQAPGKGLEWVSGISGSGGFTYYADSVKGRFTISRDNSKNTLYLQMNSLRAEDTAVYYCAKPPRGYNYGPFDYWGQGTLVTVSSASTKGPSVFPLAPCSRSTSESTAALGCLVKDYFPEPVTVSWNSGALTSGVHTFPAVLQSSGLYSLSSVVTVPSSSLGTKTYTCNVDHKPSNTKVDKRVESKYGPPCPPCPAPEFLGGPSVFLFPPKPKDTLMISRTPEVTCVVVDVSQEDPEVQFNWYVDGVEVHNAKTKPREEQFNSTYRVVSVLTVLHQDWLNGKEYKCKVSNKGLPSSIEKTISKAKGQPREPQVYTLPPSQEEMTKNQVSLTCLVKGFYPSDIAVEWESNGQPENNYKTTPPVLDSDGSFFLYSRLTVDKSRWQEGNVFSCSVMHEALHNHYTQKSLSLSLGAGGGGSGGGGSGGGGSGGGGSGAPLKIQAYFNETADLPCQFANSQNFSLSELVVLWQDQENLVLNEVYLGKEKFDSVHSKYMGRTSFDSDSWTLRLHNLQIKDKGLYQCIIIHKKPTGMIRIHQMNSELSVL

SEQ ID NO: 838 - protein, 660 aa, synthetic construct
  REGION 1..660: note = LAG3 97-156-sugemalimab antibody heavy chain -CD86 IgV-Q25I/F33L/H90F
RRYTVLSVGPGGLRSGRLPLQPRVQLDERGRQRGDFSLWLRPARRADAGEYRAAVHLRDRGGGGSGGGGSGGGGSGGGGSGEVQLLESGGGLVQPGGSLRLSCAASGFTFSSYAMSWVRQAPGKGLEWVSGISGSGGFTYYADSVKGRFTISRDNSKNTLYLQMNSLRAEDTAVYYCAKPPRGYNYGPFDYWGQGTLVTVSSASTKGPSVFPLAPCSRSTSESTAALGCLVKDYFPEPVTVSWNSGALTSGVHTFPAVLQSSGLYSLSSVVTVPSSSLGTKTYTCNVDHKPSNTKVDKRVESKYGPPCPPCPAPEFLGGPSVFLFPPKPKDTLMISRTPEVTCVVVDVSQEDPEVQFNWYVDGVEVHNAKTKPREEQFNSTYRVVSVLTVLHQDWLNGKEYKCKVSNKGLPSSIEKTISKAKGQPREPQVYTLPPSQEEMTKNQVSLTCLVKGFYPSDIAVEWESNGQPENNYKTTPPVLDSDGSFFLYSRLTVDKSRWQEGNVFSCSVMHEALHNHYTQKSLSLSLGAGGGGSGGGGSGGGGSGGGGSGAPLKIQAYFNETADLPCQFANSQNISLSELVVLWQDQENLVLNEVYLGKEKFDSVHSKYMGRTSFDSDSWTLRLHNLQIKDKGLYQCIIFHKKPTGMIRIHQMNSELSVL

SEQ ID NO: 839 - protein, 660 aa, synthetic construct
  REGION 1..660: note = LAG3 97-156-sugemalimab antibody heavy chain -CD86 IgV-Q25I/F33A/H90I
RRYTVLSVGPGGLRSGRLPLQPRVQLDERGRQRGDFSLWLRPARRADAGEYRAAVHLRDRGGGGSGGGGSGGGGSGGGGSGEVQLLESGGGLVQPGGSLRLSCAASGFTFSSYAMSWVRQAPGKGLEWVSGISGSGGFTYYADSVKGRFTISRDNSKNTLYLQMNSLRAEDTAVYYCAKPPRGYNYGPFDYWGQGTLVTVSSASTKGPSVFPLAPCSRSTSESTAALGCLVKDYFPEPVTVSWNSGALTSGVHTFPAVLQSSGLYSLSSVVTVPSSSLGTKTYTCNVDHKPSNTKVDKRVESKYGPPCPPCPAPEFLGGPSVFLFPPKPKDTLMISRTPEVTCVVVDVSQEDPEVQFNWYVDGVEVHNAKTKPREEQFNSTYRVVSVLTVLHQDWLNGKEYKCKVSNKGLPSSIEKTISKAKGQPREPQVYTLPPSQEEMTKNQVSLTCLVKGFYPSDIAVEWESNGQPENNYKTTPPVLDSDGSFFLYSRLTVDKSRWQEGNVFSCSVMHEALHNHYTQKSLSLSLGAGGGGSGGGGSGGGGSGGGGSGAPLKIQAYFNETADLPCQFANSQNISLSELVVAWQDQENLVLNEVYLGKEKFDSVHSKYMGRTSFDSDSWTLRLHNLQIKDKGLYQCIIIHKKPTGMIRIHQMNSELSVL

SEQ ID NO: 840 - protein, 660 aa, synthetic construct
  REGION 1..660: note = LAG3 97-156-sugemalimab antibody heavy chain -CD86 IgV-Q25I/H90I
RRYTVLSVGPGGLRSGRLPLQPRVQLDERGRQRGDFSLWLRPARRADAGEYRAAVHLRDRGGGGSGGGGSGGGGSGGGGSGEVQLLESGGGLVQPGGSLRLSCAASGFTFSSYAMSWVRQAPGKGLEWVSGISGSGGFTYYADSVKGRFTISRDNSKNTLYLQMNSLRAEDTAVYYCAKPPRGYNYGPFDYWGQGTLVTVSSASTKGPSVFPLAPCSRSTSESTAALGCLVKDYFPEPVTVSWNSGALTSGVHTFPAVLQSSGLYSLSSVVTVPSSSLGTKTYTCNVDHKPSNTKVDKRVESKYGPPCPPCPAPEFLGGPSVFLFPPKPKDTLMISRTPEVTCVVVDVSQEDPEVQFNWYVDGVEVHNAKTKPREEQFNSTYRVVSVLTVLHQDWLNGKEYKCKVSNKGLPSSIEKTISKAKGQPREPQVYTLPPSQEEMTKNQVSLTCLVKGFYPSDIAVEWESNGQPENNYKTTPPVLDSDGSFFLYSRLTVDKSRWQEGNVFSCSVMHEALHNHYTQKSLSLSLGAGGGGSGGGGSGGGGSGGGGSGAPLKIQAYFNETADLPCQFANSQNISLSELVVFWQDQENLVLNEVYLGKEKFDSVHSKYMGRTSFDSDSWTLRLHNLQIKDKGLYQCIIIHKKPTGMIRIHQMNSELSVL

SEQ ID NO: 841 - protein, 660 aa, synthetic construct
  REGION 1..660: note = LAG3 97-156-sugemalimab antibody heavy chain -CD86 IgV-Q25V/H90V
RRYTVLSVGPGGLRSGRLPLQPRVQLDERGRQRGDFSLWLRPARRADAGEYRAAVHLRDRGGGGSGGGGSGGGGSGGGGSGEVQLLESGGGLVQPGGSLRLSCAASGFTFSSYAMSWVRQAPGKGLEWVSGISGSGGFTYYADSVKGRFTISRDNSKNTLYLQMNSLRAEDTAVYYCAKPPRGYNYGPFDYWGQGTLVTVSSASTKGPSVFPLAPCSRSTSESTAALGCLVKDYFPEPVTVSWNSGALTSGVHTFPAVLQSSGLYSLSSVVTVPSSSLGTKTYTCNVDHKPSNTKVDKRVESKYGPPCPPCPAPEFLGGPSVFLFPPKPKDTLMISRTPEVTCVVVDVSQEDPEVQFNWYVDGVEVHNAKTKPREEQFNSTYRVVSVLTVLHQDWLNGKEYKCKVSNKGLPSSIEKTISKAKGQPREPQVYTLPPSQEEMTKNQVSLTCLVKGFYPSDIAVEWESNGQPENNYKTTPPVLDSDGSFFLYSRLTVDKSRWQEGNVFSCSVMHEALHNHYTQKSLSLSLGAGGGGSGGGGSGGGGSGGGGSGAPLKIQAYFNETADLPCQFANSQNVSLSELVVFWQDQENLVLNEVYLGKEKFDSVHSKYMGRTSFDSDSWTLRLHNLQIKDKGLYQCIIVHKKPTGMIRIHQMNSELSVL

SEQ ID NO: 842 - protein, 660 aa, synthetic construct
  REGION 1..660: note = LAG3 97-156-sugemalimab antibody heavy chain -CD86 IgV-Q25V/H90I
RRYTVLSVGPGGLRSGRLPLQPRVQLDERGRQRGDFSLWLRPARRADAGEYRAAVHLRDRGGGGSGGGGSGGGGSGGGGSGEVQLLESGGGLVQPGGSLRLSCAASGFTFSSYAMSWVRQAPGKGLEWVSGISGSGGFTYYADSVKGRFTISRDNSKNTLYLQMNSLRAEDTAVYYCAKPPRGYNYGPFDYWGQGTLVTVSSASTKGPSVFPLAPCSRSTSESTAALGCLVKDYFPEPVTVSWNSGALTSGVHTFPAVLQSSGLYSLSSVVTVPSSSLGTKTYTCNVDHKPSNTKVDKRVESKYGPPCPPCPAPEFLGGPSVFLFPPKPKDTLMISRTPEVTCVVVDVSQEDPEVQFNWYVDGVEVHNAKTKPREEQFNSTYRVVSVLTVLHQDWLNGKEYKCKVSNKGLPSSIEKTISKAKGQPREPQVYTLPPSQEEMTKNQVSLTCLVKGFYPSDIAVEWESNGQPENNYKTTPPVLDSDGSFFLYSRLTVDKSRWQEGNVFSCSVMHEALHNHYTQKSLSLSLGAGGGGSGGGGSGGGGSGGGGSGAPLKIQAYFNETADLPCQFANSQNVSLSELVVFWQDQENLVLNEVYLGKEKFDSVHSKYMGRTSFDSDSWTLRLHNLQIKDKGLYQCIIIHKKPTGMIRIHQMNSELSVL

SEQ ID NO: 843 - protein, 660 aa, synthetic construct
  REGION 1..660: note = LAG3 97-156-sugemalimab antibody heavy chain -CD86 IgV-Q25F/H90I
RRYTVLSVGPGGLRSGRLPLQPRVQLDERGRQRGDFSLWLRPARRADAGEYRAAVHLRDRGGGGSGGGGSGGGGSGGGGSGEVQLLESGGGLVQPGGSLRLSCAASGFTFSSYAMSWVRQAPGKGLEWVSGISGSGGFTYYADSVKGRFTISRDNSKNTLYLQMNSLRAEDTAVYYCAKPPRGYNYGPFDYWGQGTLVTVSSASTKGPSVFPLAPCSRSTSESTAALGCLVKDYFPEPVTVSWNSGALTSGVHTFPAVLQSSGLYSLSSVVTVPSSSLGTKTYTCNVDHKPSNTKVDKRVESKYGPPCPPCPAPEFLGGPSVFLFPPKPKDTLMISRTPEVTCVVVDVSQEDPEVQFNWYVDGVEVHNAKTKPREEQFNSTYRVVSVLTVLHQDWLNGKEYKCKVSNKGLPSSIEKTISKAKGQPREPQVYTLPPSQEEMTKNQVSLTCLVKGFYPSDIAVEWESNGQPENNYKTTPPVLDSDGSFFLYSRLTVDKSRWQEGNVFSCSVMHEALHNHYTQKSLSLSLGAGGGGSGGGGSGGGGSGGGGSGAPLKIQAYFNETADLPCQFANSQNFSLSELVVFWQDQENLVLNEVYLGKEKFDSVHSKYMGRTSFDSDSWTLRLHNLQIKDKGLYQCIIIHKKPTGMIRIHQMNSELSVL

SEQ ID NO: 844 - protein, 660 aa, synthetic construct
  REGION 1..660: note = LAG3 97-156-sugemalimab antibody heavy chain -CD86 IgV-Q25F/H90V
RRYTVLSVGPGGLRSGRLPLQPRVQLDERGRQRGDFSLWLRPARRADAGEYRAAVHLRDRGGGGSGGGGSGGGGSGGGGSGEVQLLESGGGLVQPGGSLRLSCAASGFTFSSYAMSWVRQAPGKGLEWVSGISGSGGFTYYADSVKGRFTISRDNSKNTLYLQMNSLRAEDTAVYYCAKPPRGYNYGPFDYWGQGTLVTVSSASTKGPSVFPLAPCSRSTSESTAALGCLVKDYFPEPVTVSWNSGALTSGVHTFPAVLQSSGLYSLSSVVTVPSSSLGTKTYTCNVDHKPSNTKVDKRVESKYGPPCPPCPAPEFLGGPSVFLFPPKPKDTLMISRTPEVTCVVVDVSQEDPEVQFNWYVDGVEVHNAKTKPREEQFNSTYRVVSVLTVLHQDWLNGKEYKCKVSNKGLPSSIEKTISKAKGQPREPQVYTLPPSQEEMTKNQVSLTCLVKGFYPSDIAVEWESNGQPENNYKTTPPVLDSDGSFFLYSRLTVDKSRWQEGNVFSCSVMHEALHNHYTQKSLSLSLGAGGGGSGGGGSGGGGSGGGGSGAPLKIQAYFNETADLPCQFANSQNFSLSELVVFWQDQENLVLNEVYLGKEKFDSVHSKYMGRTSFDSDSWTLRLHNLQIKDKGLYQCIIVHKKPTGMIRIHQMNSELSVL

SEQ ID NO: 845 - protein, 660 aa, synthetic construct
  REGION 1..660: note = LAG3 97-156-sugemalimab antibody heavy chain -CD86 IgV-A13F/Q25I/F33L/H90I
RRYTVLSVGPGGLRSGRLPLQPRVQLDERGRQRGDFSLWLRPARRADAGEYRAAVHLRDRGGGGSGGGGSGGGGSGGGGSGEVQLLESGGGLVQPGGSLRLSCAASGFTFSSYAMSWVRQAPGKGLEWVSGISGSGGFTYYADSVKGRFTISRDNSKNTLYLQMNSLRAEDTAVYYCAKPPRGYNYGPFDYWGQGTLVTVSSASTKGPSVFPLAPCSRSTSESTAALGCLVKDYFPEPVTVSWNSGALTSGVHTFPAVLQSSGLYSLSSVVTVPSSSLGTKTYTCNVDHKPSNTKVDKRVESKYGPPCPPCPAPEFLGGPSVFLFPPKPKDTLMISRTPEVTCVVVDVSQEDPEVQFNWYVDGVEVHNAKTKPREEQFNSTYRVVSVLTVLHQDWLNGKEYKCKVSNKGLPSSIEKTISKAKGQPREPQVYTLPPSQEEMTKNQVSLTCLVKGFYPSDIAVEWESNGQPENNYKTTPPVLDSDGSFFLYSRLTVDKSRWQEGNVFSCSVMHEALHNHYTQKSLSLSLGAGGGGSGGGGSGGGGSGGGGSGAPLKIQAYFNETFDLPCQFANSQNISLSELVVLWQDQENLVLNEVYLGKEKFDSVHSKYMGRTSFDSDSWTLRLHNLQIKDKGLYQCIIIHKKPTGMIRIHQMNSELSVL

SEQ ID NO: 846 - protein, 660 aa, synthetic construct
  REGION 1..660: note = LAG3 97-156-sugemalimab antibody heavy chain -CD86 IgV-A13M/Q25I/F33L/H90I
RRYTVLSVGPGGLRSGRLPLQPRVQLDERGRQRGDFSLWLRPARRADAGEYRAAVHLRDRGGGGSGGGGSGGGGSGGGGSGEVQLLESGGGLVQPGGSLRLSCAASGFTFSSYAMSWVRQAPGKGLEWVSGISGSGGFTYYADSVKGRFTISRDNSKNTLYLQMNSLRAEDTAVYYCAKPPRGYNYGPFDYWGQGTLVTVSSASTKGPSVFPLAPCSRSTSESTAALGCLVKDYFPEPVTVSWNSGALTSGVHTFPAVLQSSGLYSLSSVVTVPSSSLGTKTYTCNVDHKPSNTKVDKRVESKYGPPCPPCPAPEFLGGPSVFLFPPKPKDTLMISRTPEVTCVVVDVSQEDPEVQFNWYVDGVEVHNAKTKPREEQFNSTYRVVSVLTVLHQDWLNGKEYKCKVSNKGLPSSIEKTISKAKGQPREPQVYTLPPSQEEMTKNQVSLTCLVKGFYPSDIAVEWESNGQPENNYKTTPPVLDSDGSFFLYSRLTVDKSRWQEGNVFSCSVMHEALHNHYTQKSLSLSLGAGGGGSGGGGSGGGGSGGGGSGAPLKIQAYFNETMDLPCQFANSQNISLSELVVLWQDQENLVLNEVYLGKEKFDSVHSKYMGRTSFDSDSWTLRLHNLQIKDKGLYQCIIIHKKPTGMIRIHQMNSELSVL

SEQ ID NO: 847 - protein, 660 aa, synthetic construct
  REGION 1..660: note = LAG3 97-156-sugemalimab antibody heavy chain -CD86 IgV-Q25A/F33L/H90I
RRYTVLSVGPGGLRSGRLPLQPRVQLDERGRQRGDFSLWLRPARRADAGEYRAAVHLRDRGGGGSGGGGSGGGGSGGGGSGEVQLLESGGGLVQPGGSLRLSCAASGFTFSSYAMSWVRQAPGKGLEWVSGISGSGGFTYYADSVKGRFTISRDNSKNTLYLQMNSLRAEDTAVYYCAKPPRGYNYGPFDYWGQGTLVTVSSASTKGPSVFPLAPCSRSTSESTAALGCLVKDYFPEPVTVSWNSGALTSGVHTFPAVLQSSGLYSLSSVVTVPSSSLGTKTYTCNVDHKPSNTKVDKRVESKYGPPCPPCPAPEFLGGPSVFLFPPKPKDTLMISRTPEVTCVVVDVSQEDPEVQFNWYVDGVEVHNAKTKPREEQFNSTYRVVSVLTVLHQDWLNGKEYKCKVSNKGLPSSIEKTISKAKGQPREPQVYTLPPSQEEMTKNQVSLTCLVKGFYPSDIAVEWESNGQPENNYKTTPPVLDSDGSFFLYSRLTVDKSRWQEGNVFSCSVMHEALHNHYTQKSLSLSLGAGGGGSGGGGSGGGGSGGGGSGAPLKIQAYFNETADLPCQFANSQNASLSELVVLWQDQENLVLNEVYLGKEKFDSVHSKYMGRTSFDSDSWTLRLHNLQIKDKGLYQCIIIHKKPTGMIRIHQMNSELSVL

SEQ ID NO: 848 - protein, 660 aa, synthetic construct
  REGION 1..660: note = LAG3 97-156-sugemalimab antibody heavy chain -CD86 IgV-Q25M/F33L/H90I
RRYTVLSVGPGGLRSGRLPLQPRVQLDERGRQRGDFSLWLRPARRADAGEYRAAVHLRDRGGGGSGGGGSGGGGSGGGGSGEVQLLESGGGLVQPGGSLRLSCAASGFTFSSYAMSWVRQAPGKGLEWVSGISGSGGFTYYADSVKGRFTISRDNSKNTLYLQMNSLRAEDTAVYYCAKPPRGYNYGPFDYWGQGTLVTVSSASTKGPSVFPLAPCSRSTSESTAALGCLVKDYFPEPVTVSWNSGALTSGVHTFPAVLQSSGLYSLSSVVTVPSSSLGTKTYTCNVDHKPSNTKVDKRVESKYGPPCPPCPAPEFLGGPSVFLFPPKPKDTLMISRTPEVTCVVVDVSQEDPEVQFNWYVDGVEVHNAKTKPREEQFNSTYRVVSVLTVLHQDWLNGKEYKCKVSNKGLPSSIEKTISKAKGQPREPQVYTLPPSQEEMTKNQVSLTCLVKGFYPSDIAVEWESNGQPENNYKTTPPVLDSDGSFFLYSRLTVDKSRWQEGNVFSCSVMHEALHNHYTQKSLSLSLGAGGGGSGGGGSGGGGSGGGGSGAPLKIQAYFNETADLPCQFANSQNMSLSELVVLWQDQENLVLNEVYLGKEKFDSVHSKYMGRTSFDSDSWTLRLHNLQIKDKGLYQCIIIHKKPTGMIRIHQMNSELSVL

SEQ ID NO: 849 - protein, 660 aa, synthetic construct
  REGION 1..660: note = LAG3 97-156-sugemalimab antibody heavy chain -CD86 IgV-Q25I/F33M/H90I
RRYTVLSVGPGGLRSGRLPLQPRVQLDERGRQRGDFSLWLRPARRADAGEYRAAVHLRDRGGGGSGGGGSGGGGSGGGGSGEVQLLESGGGLVQPGGSLRLSCAASGFTFSSYAMSWVRQAPGKGLEWVSGISGSGGFTYYADSVKGRFTISRDNSKNTLYLQMNSLRAEDTAVYYCAKPPRGYNYGPFDYWGQGTLVTVSSASTKGPSVFPLAPCSRSTSESTAALGCLVKDYFPEPVTVSWNSGALTSGVHTFPAVLQSSGLYSLSSVVTVPSSSLGTKTYTCNVDHKPSNTKVDKRVESKYGPPCPPCPAPEFLGGPSVFLFPPKPKDTLMISRTPEVTCVVVDVSQEDPEVQFNWYVDGVEVHNAKTKPREEQFNSTYRVVSVLTVLHQDWLNGKEYKCKVSNKGLPSSIEKTISKAKGQPREPQVYTLPPSQEEMTKNQVSLTCLVKGFYPSDIAVEWESNGQPENNYKTTPPVLDSDGSFFLYSRLTVDKSRWQEGNVFSCSVMHEALHNHYTQKSLSLSLGAGGGGSGGGGSGGGGSGGGGSGAPLKIQAYFNETADLPCQFANSQNISLSELVVMWQDQENLVLNEVYLGKEKFDSVHSKYMGRTSFDSDSWTLRLHNLQIKDKGLYQCIIIHKKPTGMIRIHQMNSELSVL

SEQ ID NO: 850 - protein, 660 aa, synthetic construct
  REGION 1..660: note = LAG3 97-156-sugemalimab antibody heavy chain -CD86 IgV-Q25I/F33L/I89V/H90I
RRYTVLSVGPGGLRSGRLPLQPRVQLDERGRQRGDFSLWLRPARRADAGEYRAAVHLRDRGGGGSGGGGSGGGGSGGGGSGEVQLLESGGGLVQPGGSLRLSCAASGFTFSSYAMSWVRQAPGKGLEWVSGISGSGGFTYYADSVKGRFTISRDNSKNTLYLQMNSLRAEDTAVYYCAKPPRGYNYGPFDYWGQGTLVTVSSASTKGPSVFPLAPCSRSTSESTAALGCLVKDYFPEPVTVSWNSGALTSGVHTFPAVLQSSGLYSLSSVVTVPSSSLGTKTYTCNVDHKPSNTKVDKRVESKYGPPCPPCPAPEFLGGPSVFLFPPKPKDTLMISRTPEVTCVVVDVSQEDPEVQFNWYVDGVEVHNAKTKPREEQFNSTYRVVSVLTVLHQDWLNGKEYKCKVSNKGLPSSIEKTISKAKGQPREPQVYTLPPSQEEMTKNQVSLTCLVKGFYPSDIAVEWESNGQPENNYKTTPPVLDSDGSFFLYSRLTVDKSRWQEGNVFSCSVMHEALHNHYTQKSLSLSLGAGGGGSGGGGSGGGGSGGGGSGAPLKIQAYFNETADLPCQFANSQNISLSELVVLWQDQENLVLNEVYLGKEKFDSVHSKYMGRTSFDSDSWTLRLHNLQIKDKGLYQCIVIHKKPTGMIRIHQMNSELSVL

SEQ ID NO: 851 - protein, 660 aa, synthetic construct
  REGION 1..660: note = LAG3 97-156-sugemalimab antibody heavy chain -CD86 IgV-Q25I/F33L/I89F/H90I
RRYTVLSVGPGGLRSGRLPLQPRVQLDERGRQRGDFSLWLRPARRADAGEYRAAVHLRDRGGGGSGGGGSGGGGSGGGGSGEVQLLESGGGLVQPGGSLRLSCAASGFTFSSYAMSWVRQAPGKGLEWVSGISGSGGFTYYADSVKGRFTISRDNSKNTLYLQMNSLRAEDTAVYYCAKPPRGYNYGPFDYWGQGTLVTVSSASTKGPSVFPLAPCSRSTSESTAALGCLVKDYFPEPVTVSWNSGALTSGVHTFPAVLQSSGLYSLSSVVTVPSSSLGTKTYTCNVDHKPSNTKVDKRVESKYGPPCPPCPAPEFLGGPSVFLFPPKPKDTLMISRTPEVTCVVVDVSQEDPEVQFNWYVDGVEVHNAKTKPREEQFNSTYRVVSVLTVLHQDWLNGKEYKCKVSNKGLPSSIEKTISKAKGQPREPQVYTLPPSQEEMTKNQVSLTCLVKGFYPSDIAVEWESNGQPENNYKTTPPVLDSDGSFFLYSRLTVDKSRWQEGNVFSCSVMHEALHNHYTQKSLSLSLGAGGGGSGGGGSGGGGSGGGGSGAPLKIQAYFNETADLPCQFANSQNISLSELVVLWQDQENLVLNEVYLGKEKFDSVHSKYMGRTSFDSDSWTLRLHNLQIKDKGLYQCIFIHKKPTGMIRIHQMNSELSVL

SEQ ID NO: 852 - protein, 660 aa, synthetic construct
  REGION 1..660: note = LAG3 97-156-sugemalimab antibody heavy chain -CD86 IgV-Q25I/F33L/I89M/H90I
RRYTVLSVGPGGLRSGRLPLQPRVQLDERGRQRGDFSLWLRPARRADAGEYRAAVHLRDRGGGGSGGGGSGGGGSGGGGSGEVQLLESGGGLVQPGGSLRLSCAASGFTFSSYAMSWVRQAPGKGLEWVSGISGSGGFTYYADSVKGRFTISRDNSKNTLYLQMNSLRAEDTAVYYCAKPPRGYNYGPFDYWGQGTLVTVSSASTKGPSVFPLAPCSRSTSESTAALGCLVKDYFPEPVTVSWNSGALTSGVHTFPAVLQSSGLYSLSSVVTVPSSSLGTKTYTCNVDHKPSNTKVDKRVESKYGPPCPPCPAPEFLGGPSVFLFPPKPKDTLMISRTPEVTCVVVDVSQEDPEVQFNWYVDGVEVHNAKTKPREEQFNSTYRVVSVLTVLHQDWLNGKEYKCKVSNKGLPSSIEKTISKAKGQPREPQVYTLPPSQEEMTKNQVSLTCLVKGFYPSDIAVEWESNGQPENNYKTTPPVLDSDGSFFLYSRLTVDKSRWQEGNVFSCSVMHEALHNHYTQKSLSLSLGAGGGGSGGGGSGGGGSGGGGSGAPLKIQAYFNETADLPCQFANSQNISLSELVVLWQDQENLVLNEVYLGKEKFDSVHSKYMGRTSFDSDSWTLRLHNLQIKDKGLYQCIMIHKKPTGMIRIHQMNSELSVL

SEQ ID NO: 853 - protein, 660 aa, synthetic construct
  REGION 1..660: note = LAG3 97-156-sugemalimab antibody heavy chain -CD86 IgV-Q25I/F33L/H90M
RRYTVLSVGPGGLRSGRLPLQPRVQLDERGRQRGDFSLWLRPARRADAGEYRAAVHLRDRGGGGSGGGGSGGGGSGGGGSGEVQLLESGGGLVQPGGSLRLSCAASGFTFSSYAMSWVRQAPGKGLEWVSGISGSGGFTYYADSVKGRFTISRDNSKNTLYLQMNSLRAEDTAVYYCAKPPRGYNYGPFDYWGQGTLVTVSSASTKGPSVFPLAPCSRSTSESTAALGCLVKDYFPEPVTVSWNSGALTSGVHTFPAVLQSSGLYSLSSVVTVPSSSLGTKTYTCNVDHKPSNTKVDKRVESKYGPPCPPCPAPEFLGGPSVFLFPPKPKDTLMISRTPEVTCVVVDVSQEDPEVQFNWYVDGVEVHNAKTKPREEQFNSTYRVVSVLTVLHQDWLNGKEYKCKVSNKGLPSSIEKTISKAKGQPREPQVYTLPPSQEEMTKNQVSLTCLVKGFYPSDIAVEWESNGQPENNYKTTPPVLDSDGSFFLYSRLTVDKSRWQEGNVFSCSVMHEALHNHYTQKSLSLSLGAGGGGSGGGGSGGGGSGGGGSGAPLKIQAYFNETADLPCQFANSQNISLSELVVLWQDQENLVLNEVYLGKEKFDSVHSKYMGRTSFDSDSWTLRLHNLQIKDKGLYQCIIMHKKPTGMIRIHQMNSELSVL

SEQ ID NO: 854 - protein, 660 aa, synthetic construct
  REGION 1..660: note = LAG3 97-156-sugemalimab antibody heavy chain -CD86 IgV
RRYTVLSVGPGGLRSGRLPLQPRVQLDERGRQRGDFSLWLRPARRADAGEYRAAVHLRDRGGGGSGGGGSGGGGSGGGGSGEVQLLESGGGLVQPGGSLRLSCAASGFTFSSYAMSWVRQAPGKGLEWVSGISGSGGFTYYADSVKGRFTISRDNSKNTLYLQMNSLRAEDTAVYYCAKPPRGYNYGPFDYWGQGTLVTVSSASTKGPSVFPLAPCSRSTSESTAALGCLVKDYFPEPVTVSWNSGALTSGVHTFPAVLQSSGLYSLSSVVTVPSSSLGTKTYTCNVDHKPSNTKVDKRVESKYGPPCPPCPAPEFLGGPSVFLFPPKPKDTLMISRTPEVTCVVVDVSQEDPEVQFNWYVDGVEVHNAKTKPREEQFNSTYRVVSVLTVLHQDWLNGKEYKCKVSNKGLPSSIEKTISKAKGQPREPQVYTLPPSQEEMTKNQVSLTCLVKGFYPSDIAVEWESNGQPENNYKTTPPVLDSDGSFFLYSRLTVDKSRWQEGNVFSCSVMHEALHNHYTQKSLSLSLGAGGGGSGGGGSGGGGSGGGGSGAPLKIQAYFNETADLPCQFANSQNQSLSELVVFWQDQENLVLNEVYLGKEKFDSVHSKYMGRTSFDSDSWTLRLHNLQIKDKGLYQCIIHHKKPTGMIRIHQMNSELSVL

SEQ ID NO: 855 - protein, 660 aa, synthetic construct
  REGION 1..660: note = LAG3 R97E 97-156-sugemalimab antibody heavy chain -CD86 IgV-Q25I/F33L/H90I
ERYTVLSVGPGGLRSGRLPLQPRVQLDERGRQRGDFSLWLRPARRADAGEYRAAVHLRDRGGGGSGGGGSGGGGSGGGGSGEVQLLESGGGLVQPGGSLRLSCAASGFTFSSYAMSWVRQAPGKGLEWVSGISGSGGFTYYADSVKGRFTISRDNSKNTLYLQMNSLRAEDTAVYYCAKPPRGYNYGPFDYWGQGTLVTVSSASTKGPSVFPLAPCSRSTSESTAALGCLVKDYFPEPVTVSWNSGALTSGVHTFPAVLQSSGLYSLSSVVTVPSSSLGTKTYTCNVDHKPSNTKVDKRVESKYGPPCPPCPAPEFLGGPSVFLFPPKPKDTLMISRTPEVTCVVVDVSQEDPEVQFNWYVDGVEVHNAKTKPREEQFNSTYRVVSVLTVLHQDWLNGKEYKCKVSNKGLPSSIEKTISKAKGQPREPQVYTLPPSQEEMTKNQVSLTCLVKGFYPSDIAVEWESNGQPENNYKTTPPVLDSDGSFFLYSRLTVDKSRWQEGNVFSCSVMHEALHNHYTQKSLSLSLGAGGGGSGGGGSGGGGSGGGGSGAPLKIQAYFNETADLPCQFANSQNISLSELVVLWQDQENLVLNEVYLGKEKFDSVHSKYMGRTSFDSDSWTLRLHNLQIKDKGLYQCIIIHKKPTGMIRIHQMNSELSVL

SEQ ID NO: 856 - protein, 660 aa, synthetic construct
  REGION 1..660: note = LAG3 R97E 97-156-sugemalimab antibody heavy chain -CD86 IgV-Q25V/F33L/H90I
ERYTVLSVGPGGLRSGRLPLQPRVQLDERGRQRGDFSLWLRPARRADAGEYRAAVHLRDRGGGGSGGGGSGGGGSGGGGSGEVQLLESGGGLVQPGGSLRLSCAASGFTFSSYAMSWVRQAPGKGLEWVSGISGSGGFTYYADSVKGRFTISRDNSKNTLYLQMNSLRAEDTAVYYCAKPPRGYNYGPFDYWGQGTLVTVSSASTKGPSVFPLAPCSRSTSESTAALGCLVKDYFPEPVTVSWNSGALTSGVHTFPAVLQSSGLYSLSSVVTVPSSSLGTKTYTCNVDHKPSNTKVDKRVESKYGPPCPPCPAPEFLGGPSVFLFPPKPKDTLMISRTPEVTCVVVDVSQEDPEVQFNWYVDGVEVHNAKTKPREEQFNSTYRVVSVLTVLHQDWLNGKEYKCKVSNKGLPSSIEKTISKAKGQPREPQVYTLPPSQEEMTKNQVSLTCLVKGFYPSDIAVEWESNGQPENNYKTTPPVLDSDGSFFLYSRLTVDKSRWQEGNVFSCSVMHEALHNHYTQKSLSLSLGAGGGGSGGGGSGGGGSGGGGSGAPLKIQAYFNETADLPCQFANSQNVSLSELVVLWQDQENLVLNEVYLGKEKFDSVHSKYMGRTSFDSDSWTLRLHNLQIKDKGLYQCIIIHKKPTGMIRIHQMNSELSVL

SEQ ID NO: 857 - protein, 660 aa, synthetic construct
  REGION 1..660: note = LAG3 R97E 97-156-sugemalimab antibody heavy chain -CD86 IgV-Q25I/F33V/H90I
ERYTVLSVGPGGLRSGRLPLQPRVQLDERGRQRGDFSLWLRPARRADAGEYRAAVHLRDRGGGGSGGGGSGGGGSGGGGSGEVQLLESGGGLVQPGGSLRLSCAASGFTFSSYAMSWVRQAPGKGLEWVSGISGSGGFTYYADSVKGRFTISRDNSKNTLYLQMNSLRAEDTAVYYCAKPPRGYNYGPFDYWGQGTLVTVSSASTKGPSVFPLAPCSRSTSESTAALGCLVKDYFPEPVTVSWNSGALTSGVHTFPAVLQSSGLYSLSSVVTVPSSSLGTKTYTCNVDHKPSNTKVDKRVESKYGPPCPPCPAPEFLGGPSVFLFPPKPKDTLMISRTPEVTCVVVDVSQEDPEVQFNWYVDGVEVHNAKTKPREEQFNSTYRVVSVLTVLHQDWLNGKEYKCKVSNKGLPSSIEKTISKAKGQPREPQVYTLPPSQEEMTKNQVSLTCLVKGFYPSDIAVEWESNGQPENNYKTTPPVLDSDGSFFLYSRLTVDKSRWQEGNVFSCSVMHEALHNHYTQKSLSLSLGAGGGGSGGGGSGGGGSGGGGSGAPLKIQAYFNETADLPCQFANSQNISLSELVVVWQDQENLVLNEVYLGKEKFDSVHSKYMGRTSFDSDSWTLRLHNLQIKDKGLYQCIIIHKKPTGMIRIHQMNSELSVL

SEQ ID NO: 858 - protein, 660 aa, synthetic construct
  REGION 1..660: note = LAG3 R97E 97-156-sugemalimab antibody heavy chain -CD86 IgV-Q25V/F33V/H90I
ERYTVLSVGPGGLRSGRLPLQPRVQLDERGRQRGDFSLWLRPARRADAGEYRAAVHLRDRGGGGSGGGGSGGGGSGGGGSGEVQLLESGGGLVQPGGSLRLSCAASGFTFSSYAMSWVRQAPGKGLEWVSGISGSGGFTYYADSVKGRFTISRDNSKNTLYLQMNSLRAEDTAVYYCAKPPRGYNYGPFDYWGQGTLVTVSSASTKGPSVFPLAPCSRSTSESTAALGCLVKDYFPEPVTVSWNSGALTSGVHTFPAVLQSSGLYSLSSVVTVPSSSLGTKTYTCNVDHKPSNTKVDKRVESKYGPPCPPCPAPEFLGGPSVFLFPPKPKDTLMISRTPEVTCVVVDVSQEDPEVQFNWYVDGVEVHNAKTKPREEQFNSTYRVVSVLTVLHQDWLNGKEYKCKVSNKGLPSSIEKTISKAKGQPREPQVYTLPPSQEEMTKNQVSLTCLVKGFYPSDIAVEWESNGQPENNYKTTPPVLDSDGSFFLYSRLTVDKSRWQEGNVFSCSVMHEALHNHYTQKSLSLSLGAGGGGSGGGGSGGGGSGGGGSGAPLKIQAYFNETADLPCQFANSQNVSLSELVVVWQDQENLVLNEVYLGKEKFDSVHSKYMGRTSFDSDSWTLRLHNLQIKDKGLYQCIIIHKKPTGMIRIHQMNSELSVL

SEQ ID NO: 859 - protein, 660 aa, synthetic construct
  REGION 1..660: note = LAG3 R97E 97-156-sugemalimab antibody heavy chain -CD86 IgV-Q25I/F33L/H90V
ERYTVLSVGPGGLRSGRLPLQPRVQLDERGRQRGDFSLWLRPARRADAGEYRAAVHLRDRGGGGSGGGGSGGGGSGGGGSGEVQLLESGGGLVQPGGSLRLSCAASGFTFSSYAMSWVRQAPGKGLEWVSGISGSGGFTYYADSVKGRFTISRDNSKNTLYLQMNSLRAEDTAVYYCAKPPRGYNYGPFDYWGQGTLVTVSSASTKGPSVFPLAPCSRSTSESTAALGCLVKDYFPEPVTVSWNSGALTSGVHTFPAVLQSSGLYSLSSVVTVPSSSLGTKTYTCNVDHKPSNTKVDKRVESKYGPPCPPCPAPEFLGGPSVFLFPPKPKDTLMISRTPEVTCVVVDVSQEDPEVQFNWYVDGVEVHNAKTKPREEQFNSTYRVVSVLTVLHQDWLNGKEYKCKVSNKGLPSSIEKTISKAKGQPREPQVYTLPPSQEEMTKNQVSLTCLVKGFYPSDIAVEWESNGQPENNYKTTPPVLDSDGSFFLYSRLTVDKSRWQEGNVFSCSVMHEALHNHYTQKSLSLSLGAGGGGSGGGGSGGGGSGGGGSGAPLKIQAYFNETADLPCQFANSQNISLSELVVLWQDQENLVLNEVYLGKEKFDSVHSKYMGRTSFDSDSWTLRLHNLQIKDKGLYQCIIVHKKPTGMIRIHQMNSELSVL

SEQ ID NO: 860 - protein, 660 aa, synthetic construct
  REGION 1..660: note = LAG3 R97E 97-156-sugemalimab antibody heavy chain -CD86 IgV-Q25V/F33L/H90V
ERYTVLSVGPGGLRSGRLPLQPRVQLDERGRQRGDFSLWLRPARRADAGEYRAAVHLRDRGGGGSGGGGSGGGGSGGGGSGEVQLLESGGGLVQPGGSLRLSCAASGFTFSSYAMSWVRQAPGKGLEWVSGISGSGGFTYYADSVKGRFTISRDNSKNTLYLQMNSLRAEDTAVYYCAKPPRGYNYGPFDYWGQGTLVTVSSASTKGPSVFPLAPCSRSTSESTAALGCLVKDYFPEPVTVSWNSGALTSGVHTFPAVLQSSGLYSLSSVVTVPSSSLGTKTYTCNVDHKPSNTKVDKRVESKYGPPCPPCPAPEFLGGPSVFLFPPKPKDTLMISRTPEVTCVVVDVSQEDPEVQFNWYVDGVEVHNAKTKPREEQFNSTYRVVSVLTVLHQDWLNGKEYKCKVSNKGLPSSIEKTISKAKGQPREPQVYTLPPSQEEMTKNQVSLTCLVKGFYPSDIAVEWESNGQPENNYKTTPPVLDSDGSFFLYSRLTVDKSRWQEGNVFSCSVMHEALHNHYTQKSLSLSLGAGGGGSGGGGSGGGGSGGGGSGAPLKIQAYFNETADLPCQFANSQNVSLSELVVLWQDQENLVLNEVYLGKEKFDSVHSKYMGRTSFDSDSWTLRLHNLQIKDKGLYQCIIVHKKPTGMIRIHQMNSELSVL

SEQ ID NO: 861 - protein, 660 aa, synthetic construct
  REGION 1..660: note = LAG3 R97E 97-156-sugemalimab antibody heavy chain -CD86 IgV-Q25I/F33V/H90V
ERYTVLSVGPGGLRSGRLPLQPRVQLDERGRQRGDFSLWLRPARRADAGEYRAAVHLRDRGGGGSGGGGSGGGGSGGGGSGEVQLLESGGGLVQPGGSLRLSCAASGFTFSSYAMSWVRQAPGKGLEWVSGISGSGGFTYYADSVKGRFTISRDNSKNTLYLQMNSLRAEDTAVYYCAKPPRGYNYGPFDYWGQGTLVTVSSASTKGPSVFPLAPCSRSTSESTAALGCLVKDYFPEPVTVSWNSGALTSGVHTFPAVLQSSGLYSLSSVVTVPSSSLGTKTYTCNVDHKPSNTKVDKRVESKYGPPCPPCPAPEFLGGPSVFLFPPKPKDTLMISRTPEVTCVVVDVSQEDPEVQFNWYVDGVEVHNAKTKPREEQFNSTYRVVSVLTVLHQDWLNGKEYKCKVSNKGLPSSIEKTISKAKGQPREPQVYTLPPSQEEMTKNQVSLTCLVKGFYPSDIAVEWESNGQPENNYKTTPPVLDSDGSFFLYSRLTVDKSRWQEGNVFSCSVMHEALHNHYTQKSLSLSLGAGGGGSGGGGSGGGGSGGGGSGAPLKIQAYFNETADLPCQFANSQNISLSELVVVWQDQENLVLNEVYLGKEKFDSVHSKYMGRTSFDSDSWTLRLHNLQIKDKGLYQCIIVHKKPTGMIRIHQMNSELSVL

SEQ ID NO: 862 - protein, 660 aa, synthetic construct
  REGION 1..660: note = LAG3 R97E 97-156-sugemalimab antibody heavy chain -CD86 IgV-Q25V/F33V/H90V
ERYTVLSVGPGGLRSGRLPLQPRVQLDERGRQRGDFSLWLRPARRADAGEYRAAVHLRDRGGGGSGGGGSGGGGSGGGGSGEVQLLESGGGLVQPGGSLRLSCAASGFTFSSYAMSWVRQAPGKGLEWVSGISGSGGFTYYADSVKGRFTISRDNSKNTLYLQMNSLRAEDTAVYYCAKPPRGYNYGPFDYWGQGTLVTVSSASTKGPSVFPLAPCSRSTSESTAALGCLVKDYFPEPVTVSWNSGALTSGVHTFPAVLQSSGLYSLSSVVTVPSSSLGTKTYTCNVDHKPSNTKVDKRVESKYGPPCPPCPAPEFLGGPSVFLFPPKPKDTLMISRTPEVTCVVVDVSQEDPEVQFNWYVDGVEVHNAKTKPREEQFNSTYRVVSVLTVLHQDWLNGKEYKCKVSNKGLPSSIEKTISKAKGQPREPQVYTLPPSQEEMTKNQVSLTCLVKGFYPSDIAVEWESNGQPENNYKTTPPVLDSDGSFFLYSRLTVDKSRWQEGNVFSCSVMHEALHNHYTQKSLSLSLGAGGGGSGGGGSGGGGSGGGGSGAPLKIQAYFNETADLPCQFANSQNVSLSELVVVWQDQENLVLNEVYLGKEKFDSVHSKYMGRTSFDSDSWTLRLHNLQIKDKGLYQCIIVHKKPTGMIRIHQMNSELSVL

SEQ ID NO: 863 - protein, 660 aa, synthetic construct
  REGION 1..660: note = LAG3 R97E 97-156-sugemalimab antibody heavy chain -CD86 IgV-A13L/Q25I/F33L/H90I
ERYTVLSVGPGGLRSGRLPLQPRVQLDERGRQRGDFSLWLRPARRADAGEYRAAVHLRDRGGGGSGGGGSGGGGSGGGGSGEVQLLESGGGLVQPGGSLRLSCAASGFTFSSYAMSWVRQAPGKGLEWVSGISGSGGFTYYADSVKGRFTISRDNSKNTLYLQMNSLRAEDTAVYYCAKPPRGYNYGPFDYWGQGTLVTVSSASTKGPSVFPLAPCSRSTSESTAALGCLVKDYFPEPVTVSWNSGALTSGVHTFPAVLQSSGLYSLSSVVTVPSSSLGTKTYTCNVDHKPSNTKVDKRVESKYGPPCPPCPAPEFLGGPSVFLFPPKPKDTLMISRTPEVTCVVVDVSQEDPEVQFNWYVDGVEVHNAKTKPREEQFNSTYRVVSVLTVLHQDWLNGKEYKCKVSNKGLPSSIEKTISKAKGQPREPQVYTLPPSQEEMTKNQVSLTCLVKGFYPSDIAVEWESNGQPENNYKTTPPVLDSDGSFFLYSRLTVDKSRWQEGNVFSCSVMHEALHNHYTQKSLSLSLGAGGGGSGGGGSGGGGSGGGGSGAPLKIQAYFNETLDLPCQFANSQNISLSELVVLWQDQENLVLNEVYLGKEKFDSVHSKYMGRTSFDSDSWTLRLHNLQIKDKGLYQCIIIHKKPTGMIRIHQMNSELSVL

SEQ ID NO: 864 - protein, 660 aa, synthetic construct
  REGION 1..660: note = LAG3 R97E 97-156-sugemalimab antibody heavy chain -CD86 IgV-A13I/Q25I/F33L/H90I
ERYTVLSVGPGGLRSGRLPLQPRVQLDERGRQRGDFSLWLRPARRADAGEYRAAVHLRDRGGGGSGGGGSGGGGSGGGGSGEVQLLESGGGLVQPGGSLRLSCAASGFTFSSYAMSWVRQAPGKGLEWVSGISGSGGFTYYADSVKGRFTISRDNSKNTLYLQMNSLRAEDTAVYYCAKPPRGYNYGPFDYWGQGTLVTVSSASTKGPSVFPLAPCSRSTSESTAALGCLVKDYFPEPVTVSWNSGALTSGVHTFPAVLQSSGLYSLSSVVTVPSSSLGTKTYTCNVDHKPSNTKVDKRVESKYGPPCPPCPAPEFLGGPSVFLFPPKPKDTLMISRTPEVTCVVVDVSQEDPEVQFNWYVDGVEVHNAKTKPREEQFNSTYRVVSVLTVLHQDWLNGKEYKCKVSNKGLPSSIEKTISKAKGQPREPQVYTLPPSQEEMTKNQVSLTCLVKGFYPSDIAVEWESNGQPENNYKTTPPVLDSDGSFFLYSRLTVDKSRWQEGNVFSCSVMHEALHNHYTQKSLSLSLGAGGGGSGGGGSGGGGSGGGGSGAPLKIQAYFNETIDLPCQFANSQNISLSELVVLWQDQENLVLNEVYLGKEKFDSVHSKYMGRTSFDSDSWTLRLHNLQIKDKGLYQCIIIHKKPTGMIRIHQMNSELSVL

SEQ ID NO: 865 - protein, 660 aa, synthetic construct
  REGION 1..660: note = LAG3 R97E 97-156-sugemalimab antibody heavy chain -CD86 IgV-A13L/Q25V/F33L/H90I
ERYTVLSVGPGGLRSGRLPLQPRVQLDERGRQRGDFSLWLRPARRADAGEYRAAVHLRDRGGGGSGGGGSGGGGSGGGGSGEVQLLESGGGLVQPGGSLRLSCAASGFTFSSYAMSWVRQAPGKGLEWVSGISGSGGFTYYADSVKGRFTISRDNSKNTLYLQMNSLRAEDTAVYYCAKPPRGYNYGPFDYWGQGTLVTVSSASTKGPSVFPLAPCSRSTSESTAALGCLVKDYFPEPVTVSWNSGALTSGVHTFPAVLQSSGLYSLSSVVTVPSSSLGTKTYTCNVDHKPSNTKVDKRVESKYGPPCPPCPAPEFLGGPSVFLFPPKPKDTLMISRTPEVTCVVVDVSQEDPEVQFNWYVDGVEVHNAKTKPREEQFNSTYRVVSVLTVLHQDWLNGKEYKCKVSNKGLPSSIEKTISKAKGQPREPQVYTLPPSQEEMTKNQVSLTCLVKGFYPSDIAVEWESNGQPENNYKTTPPVLDSDGSFFLYSRLTVDKSRWQEGNVFSCSVMHEALHNHYTQKSLSLSLGAGGGGSGGGGSGGGGSGGGGSGAPLKIQAYFNETLDLPCQFANSQNVSLSELVVLWQDQENLVLNEVYLGKEKFDSVHSKYMGRTSFDSDSWTLRLHNLQIKDKGLYQCIIIHKKPTGMIRIHQMNSELSVL

SEQ ID NO: 866 - protein, 660 aa, synthetic construct
  REGION 1..660: note = LAG3 R97E 97-156-sugemalimab antibody heavy chain -CD86 IgV-A13I/Q25V/F33L/H90I
ERYTVLSVGPGGLRSGRLPLQPRVQLDERGRQRGDFSLWLRPARRADAGEYRAAVHLRDRGGGGSGGGGSGGGGSGGGGSGEVQLLESGGGLVQPGGSLRLSCAASGFTFSSYAMSWVRQAPGKGLEWVSGISGSGGFTYYADSVKGRFTISRDNSKNTLYLQMNSLRAEDTAVYYCAKPPRGYNYGPFDYWGQGTLVTVSSASTKGPSVFPLAPCSRSTSESTAALGCLVKDYFPEPVTVSWNSGALTSGVHTFPAVLQSSGLYSLSSVVTVPSSSLGTKTYTCNVDHKPSNTKVDKRVESKYGPPCPPCPAPEFLGGPSVFLFPPKPKDTLMISRTPEVTCVVVDVSQEDPEVQFNWYVDGVEVHNAKTKPREEQFNSTYRVVSVLTVLHQDWLNGKEYKCKVSNKGLPSSIEKTISKAKGQPREPQVYTLPPSQEEMTKNQVSLTCLVKGFYPSDIAVEWESNGQPENNYKTTPPVLDSDGSFFLYSRLTVDKSRWQEGNVFSCSVMHEALHNHYTQKSLSLSLGAGGGGSGGGGSGGGGSGGGGSGAPLKIQAYFNETIDLPCQFANSQNVSLSELVVLWQDQENLVLNEVYLGKEKFDSVHSKYMGRTSFDSDSWTLRLHNLQIKDKGLYQCIIIHKKPTGMIRIHQMNSELSVL

SEQ ID NO: 867 - protein, 660 aa, synthetic construct
  REGION 1..660: note = LAG3 R97E 97-156-sugemalimab antibody heavy chain -CD86 IgV-Q25I/F33L/I89L/H90I
ERYTVLSVGPGGLRSGRLPLQPRVQLDERGRQRGDFSLWLRPARRADAGEYRAAVHLRDRGGGGSGGGGSGGGGSGGGGSGEVQLLESGGGLVQPGGSLRLSCAASGFTFSSYAMSWVRQAPGKGLEWVSGISGSGGFTYYADSVKGRFTISRDNSKNTLYLQMNSLRAEDTAVYYCAKPPRGYNYGPFDYWGQGTLVTVSSASTKGPSVFPLAPCSRSTSESTAALGCLVKDYFPEPVTVSWNSGALTSGVHTFPAVLQSSGLYSLSSVVTVPSSSLGTKTYTCNVDHKPSNTKVDKRVESKYGPPCPPCPAPEFLGGPSVFLFPPKPKDTLMISRTPEVTCVVVDVSQEDPEVQFNWYVDGVEVHNAKTKPREEQFNSTYRVVSVLTVLHQDWLNGKEYKCKVSNKGLPSSIEKTISKAKGQPREPQVYTLPPSQEEMTKNQVSLTCLVKGFYPSDIAVEWESNGQPENNYKTTPPVLDSDGSFFLYSRLTVDKSRWQEGNVFSCSVMHEALHNHYTQKSLSLSLGAGGGGSGGGGSGGGGSGGGGSGAPLKIQAYFNETADLPCQFANSQNISLSELVVLWQDQENLVLNEVYLGKEKFDSVHSKYMGRTSFDSDSWTLRLHNLQIKDKGLYQCILIHKKPTGMIRIHQMNSELSVL

SEQ ID NO: 868 - protein, 660 aa, synthetic construct
  REGION 1..660: note = LAG3 R97E 97-156-sugemalimab antibody heavy chain -CD86 IgV-Q25I/F33L/M60R/H90I
ERYTVLSVGPGGLRSGRLPLQPRVQLDERGRQRGDFSLWLRPARRADAGEYRAAVHLRDRGGGGSGGGGSGGGGSGGGGSGEVQLLESGGGLVQPGGSLRLSCAASGFTFSSYAMSWVRQAPGKGLEWVSGISGSGGFTYYADSVKGRFTISRDNSKNTLYLQMNSLRAEDTAVYYCAKPPRGYNYGPFDYWGQGTLVTVSSASTKGPSVFPLAPCSRSTSESTAALGCLVKDYFPEPVTVSWNSGALTSGVHTFPAVLQSSGLYSLSSVVTVPSSSLGTKTYTCNVDHKPSNTKVDKRVESKYGPPCPPCPAPEFLGGPSVFLFPPKPKDTLMISRTPEVTCVVVDVSQEDPEVQFNWYVDGVEVHNAKTKPREEQFNSTYRVVSVLTVLHQDWLNGKEYKCKVSNKGLPSSIEKTISKAKGQPREPQVYTLPPSQEEMTKNQVSLTCLVKGFYPSDIAVEWESNGQPENNYKTTPPVLDSDGSFFLYSRLTVDKSRWQEGNVFSCSVMHEALHNHYTQKSLSLSLGAGGGGSGGGGSGGGGSGGGGSGAPLKIQAYFNETADLPCQFANSQNISLSELVVLWQDQENLVLNEVYLGKEKFDSVHSKYRGRTSFDSDSWTLRLHNLQIKDKGLYQCIIIHKKPTGMIRIHQMNSELSVL

SEQ ID NO: 869 - protein, 660 aa, synthetic construct
  REGION 1..660: note = LAG3 R97E 97-156-sugemalimab antibody heavy chain -CD86 IgV-Q25V/F33L/I89L/H90I
ERYTVLSVGPGGLRSGRLPLQPRVQLDERGRQRGDFSLWLRPARRADAGEYRAAVHLRDRGGGGSGGGGSGGGGSGGGGSGEVQLLESGGGLVQPGGSLRLSCAASGFTFSSYAMSWVRQAPGKGLEWVSGISGSGGFTYYADSVKGRFTISRDNSKNTLYLQMNSLRAEDTAVYYCAKPPRGYNYGPFDYWGQGTLVTVSSASTKGPSVFPLAPCSRSTSESTAALGCLVKDYFPEPVTVSWNSGALTSGVHTFPAVLQSSGLYSLSSVVTVPSSSLGTKTYTCNVDHKPSNTKVDKRVESKYGPPCPPCPAPEFLGGPSVFLFPPKPKDTLMISRTPEVTCVVVDVSQEDPEVQFNWYVDGVEVHNAKTKPREEQFNSTYRVVSVLTVLHQDWLNGKEYKCKVSNKGLPSSIEKTISKAKGQPREPQVYTLPPSQEEMTKNQVSLTCLVKGFYPSDIAVEWESNGQPENNYKTTPPVLDSDGSFFLYSRLTVDKSRWQEGNVFSCSVMHEALHNHYTQKSLSLSLGAGGGGSGGGGSGGGGSGGGGSGAPLKIQAYFNETADLPCQFANSQNVSLSELVVLWQDQENLVLNEVYLGKEKFDSVHSKYMGRTSFDSDSWTLRLHNLQIKDKGLYQCILIHKKPTGMIRIHQMNSELSVL

SEQ ID NO: 870 - protein, 660 aa, synthetic construct
  REGION 1..660: note = LAG3 R97E 97-156-sugemalimab antibody heavy chain -CD86 IgV-Q25V/F33L/M60R/H90I
ERYTVLSVGPGGLRSGRLPLQPRVQLDERGRQRGDFSLWLRPARRADAGEYRAAVHLRDRGGGGSGGGGSGGGGSGGGGSGEVQLLESGGGLVQPGGSLRLSCAASGFTFSSYAMSWVRQAPGKGLEWVSGISGSGGFTYYADSVKGRFTISRDNSKNTLYLQMNSLRAEDTAVYYCAKPPRGYNYGPFDYWGQGTLVTVSSASTKGPSVFPLAPCSRSTSESTAALGCLVKDYFPEPVTVSWNSGALTSGVHTFPAVLQSSGLYSLSSVVTVPSSSLGTKTYTCNVDHKPSNTKVDKRVESKYGPPCPPCPAPEFLGGPSVFLFPPKPKDTLMISRTPEVTCVVVDVSQEDPEVQFNWYVDGVEVHNAKTKPREEQFNSTYRVVSVLTVLHQDWLNGKEYKCKVSNKGLPSSIEKTISKAKGQPREPQVYTLPPSQEEMTKNQVSLTCLVKGFYPSDIAVEWESNGQPENNYKTTPPVLDSDGSFFLYSRLTVDKSRWQEGNVFSCSVMHEALHNHYTQKSLSLSLGAGGGGSGGGGSGGGGSGGGGSGAPLKIQAYFNETADLPCQFANSQNVSLSELVVLWQDQENLVLNEVYLGKEKFDSVHSKYRGRTSFDSDSWTLRLHNLQIKDKGLYQCIIIHKKPTGMIRIHQMNSELSVL

SEQ ID NO: 871 - protein, 660 aa, synthetic construct
  REGION 1..660: note = LAG3 R97E 97-156-sugemalimab antibody heavy chain -CD86 IgV-Q25F/F33L/H90I
ERYTVLSVGPGGLRSGRLPLQPRVQLDERGRQRGDFSLWLRPARRADAGEYRAAVHLRDRGGGGSGGGGSGGGGSGGGGSGEVQLLESGGGLVQPGGSLRLSCAASGFTFSSYAMSWVRQAPGKGLEWVSGISGSGGFTYYADSVKGRFTISRDNSKNTLYLQMNSLRAEDTAVYYCAKPPRGYNYGPFDYWGQGTLVTVSSASTKGPSVFPLAPCSRSTSESTAALGCLVKDYFPEPVTVSWNSGALTSGVHTFPAVLQSSGLYSLSSVVTVPSSSLGTKTYTCNVDHKPSNTKVDKRVESKYGPPCPPCPAPEFLGGPSVFLFPPKPKDTLMISRTPEVTCVVVDVSQEDPEVQFNWYVDGVEVHNAKTKPREEQFNSTYRVVSVLTVLHQDWLNGKEYKCKVSNKGLPSSIEKTISKAKGQPREPQVYTLPPSQEEMTKNQVSLTCLVKGFYPSDIAVEWESNGQPENNYKTTPPVLDSDGSFFLYSRLTVDKSRWQEGNVFSCSVMHEALHNHYTQKSLSLSLGAGGGGSGGGGSGGGGSGGGGSGAPLKIQAYFNETADLPCQFANSQNFSLSELVVLWQDQENLVLNEVYLGKEKFDSVHSKYMGRTSFDSDSWTLRLHNLQIKDKGLYQCIIIHKKPTGMIRIHQMNSELSVL

SEQ ID NO: 872 - protein, 660 aa, synthetic construct
  REGION 1..660: note = LAG3 R97E 97-156-sugemalimab antibody heavy chain -CD86 IgV-Q25I/F33L/H90F
ERYTVLSVGPGGLRSGRLPLQPRVQLDERGRQRGDFSLWLRPARRADAGEYRAAVHLRDRGGGGSGGGGSGGGGSGGGGSGEVQLLESGGGLVQPGGSLRLSCAASGFTFSSYAMSWVRQAPGKGLEWVSGISGSGGFTYYADSVKGRFTISRDNSKNTLYLQMNSLRAEDTAVYYCAKPPRGYNYGPFDYWGQGTLVTVSSASTKGPSVFPLAPCSRSTSESTAALGCLVKDYFPEPVTVSWNSGALTSGVHTFPAVLQSSGLYSLSSVVTVPSSSLGTKTYTCNVDHKPSNTKVDKRVESKYGPPCPPCPAPEFLGGPSVFLFPPKPKDTLMISRTPEVTCVVVDVSQEDPEVQFNWYVDGVEVHNAKTKPREEQFNSTYRVVSVLTVLHQDWLNGKEYKCKVSNKGLPSSIEKTISKAKGQPREPQVYTLPPSQEEMTKNQVSLTCLVKGFYPSDIAVEWESNGQPENNYKTTPPVLDSDGSFFLYSRLTVDKSRWQEGNVFSCSVMHEALHNHYTQKSLSLSLGAGGGGSGGGGSGGGGSGGGGSGAPLKIQAYFNETADLPCQFANSQNISLSELVVLWQDQENLVLNEVYLGKEKFDSVHSKYMGRTSFDSDSWTLRLHNLQIKDKGLYQCIIFHKKPTGMIRIHQMNSELSVL

SEQ ID NO: 873 - protein, 660 aa, synthetic construct
  REGION 1..660: note = LAG3 R97E 97-156-sugemalimab antibody heavy chain -CD86 IgV-Q25I/F33A/H90I
ERYTVLSVGPGGLRSGRLPLQPRVQLDERGRQRGDFSLWLRPARRADAGEYRAAVHLRDRGGGGSGGGGSGGGGSGGGGSGEVQLLESGGGLVQPGGSLRLSCAASGFTFSSYAMSWVRQAPGKGLEWVSGISGSGGFTYYADSVKGRFTISRDNSKNTLYLQMNSLRAEDTAVYYCAKPPRGYNYGPFDYWGQGTLVTVSSASTKGPSVFPLAPCSRSTSESTAALGCLVKDYFPEPVTVSWNSGALTSGVHTFPAVLQSSGLYSLSSVVTVPSSSLGTKTYTCNVDHKPSNTKVDKRVESKYGPPCPPCPAPEFLGGPSVFLFPPKPKDTLMISRTPEVTCVVVDVSQEDPEVQFNWYVDGVEVHNAKTKPREEQFNSTYRVVSVLTVLHQDWLNGKEYKCKVSNKGLPSSIEKTISKAKGQPREPQVYTLPPSQEEMTKNQVSLTCLVKGFYPSDIAVEWESNGQPENNYKTTPPVLDSDGSFFLYSRLTVDKSRWQEGNVFSCSVMHEALHNHYTQKSLSLSLGAGGGGSGGGGSGGGGSGGGGSGAPLKIQAYFNETADLPCQFANSQNISLSELVVAWQDQENLVLNEVYLGKEKFDSVHSKYMGRTSFDSDSWTLRLHNLQIKDKGLYQCIIIHKKPTGMIRIHQMNSELSVL

SEQ ID NO: 874 - protein, 660 aa, synthetic construct
  REGION 1..660: note = LAG3 R97E 97-156-sugemalimab antibody heavy chain -CD86 IgV-Q25I/H90I
ERYTVLSVGPGGLRSGRLPLQPRVQLDERGRQRGDFSLWLRPARRADAGEYRAAVHLRDRGGGGSGGGGSGGGGSGGGGSGEVQLLESGGGLVQPGGSLRLSCAASGFTFSSYAMSWVRQAPGKGLEWVSGISGSGGFTYYADSVKGRFTISRDNSKNTLYLQMNSLRAEDTAVYYCAKPPRGYNYGPFDYWGQGTLVTVSSASTKGPSVFPLAPCSRSTSESTAALGCLVKDYFPEPVTVSWNSGALTSGVHTFPAVLQSSGLYSLSSVVTVPSSSLGTKTYTCNVDHKPSNTKVDKRVESKYGPPCPPCPAPEFLGGPSVFLFPPKPKDTLMISRTPEVTCVVVDVSQEDPEVQFNWYVDGVEVHNAKTKPREEQFNSTYRVVSVLTVLHQDWLNGKEYKCKVSNKGLPSSIEKTISKAKGQPREPQVYTLPPSQEEMTKNQVSLTCLVKGFYPSDIAVEWESNGQPENNYKTTPPVLDSDGSFFLYSRLTVDKSRWQEGNVFSCSVMHEALHNHYTQKSLSLSLGAGGGGSGGGGSGGGGSGGGGSGAPLKIQAYFNETADLPCQFANSQNISLSELVVFWQDQENLVLNEVYLGKEKFDSVHSKYMGRTSFDSDSWTLRLHNLQIKDKGLYQCIIIHKKPTGMIRIHQMNSELSVL

SEQ ID NO: 875 - protein, 660 aa, synthetic construct
  REGION 1..660: note = LAG3 R97E 97-156-sugemalimab antibody heavy chain -CD86 IgV-Q25V/H90V
ERYTVLSVGPGGLRSGRLPLQPRVQLDERGRQRGDFSLWLRPARRADAGEYRAAVHLRDRGGGGSGGGGSGGGGSGGGGSGEVQLLESGGGLVQPGGSLRLSCAASGFTFSSYAMSWVRQAPGKGLEWVSGISGSGGFTYYADSVKGRFTISRDNSKNTLYLQMNSLRAEDTAVYYCAKPPRGYNYGPFDYWGQGTLVTVSSASTKGPSVFPLAPCSRSTSESTAALGCLVKDYFPEPVTVSWNSGALTSGVHTFPAVLQSSGLYSLSSVVTVPSSSLGTKTYTCNVDHKPSNTKVDKRVESKYGPPCPPCPAPEFLGGPSVFLFPPKPKDTLMISRTPEVTCVVVDVSQEDPEVQFNWYVDGVEVHNAKTKPREEQFNSTYRVVSVLTVLHQDWLNGKEYKCKVSNKGLPSSIEKTISKAKGQPREPQVYTLPPSQEEMTKNQVSLTCLVKGFYPSDIAVEWESNGQPENNYKTTPPVLDSDGSFFLYSRLTVDKSRWQEGNVFSCSVMHEALHNHYTQKSLSLSLGAGGGGSGGGGSGGGGSGGGGSGAPLKIQAYFNETADLPCQFANSQNVSLSELVVFWQDQENLVLNEVYLGKEKFDSVHSKYMGRTSFDSDSWTLRLHNLQIKDKGLYQCIIVHKKPTGMIRIHQMNSELSVL

SEQ ID NO: 876 - protein, 660 aa, synthetic construct
  REGION 1..660: note = LAG3 R97E 97-156-sugemalimab antibody heavy chain -CD86 IgV-Q25V/H90I
ERYTVLSVGPGGLRSGRLPLQPRVQLDERGRQRGDFSLWLRPARRADAGEYRAAVHLRDRGGGGSGGGGSGGGGSGGGGSGEVQLLESGGGLVQPGGSLRLSCAASGFTFSSYAMSWVRQAPGKGLEWVSGISGSGGFTYYADSVKGRFTISRDNSKNTLYLQMNSLRAEDTAVYYCAKPPRGYNYGPFDYWGQGTLVTVSSASTKGPSVFPLAPCSRSTSESTAALGCLVKDYFPEPVTVSWNSGALTSGVHTFPAVLQSSGLYSLSSVVTVPSSSLGTKTYTCNVDHKPSNTKVDKRVESKYGPPCPPCPAPEFLGGPSVFLFPPKPKDTLMISRTPEVTCVVVDVSQEDPEVQFNWYVDGVEVHNAKTKPREEQFNSTYRVVSVLTVLHQDWLNGKEYKCKVSNKGLPSSIEKTISKAKGQPREPQVYTLPPSQEEMTKNQVSLTCLVKGFYPSDIAVEWESNGQPENNYKTTPPVLDSDGSFFLYSRLTVDKSRWQEGNVFSCSVMHEALHNHYTQKSLSLSLGAGGGGSGGGGSGGGGSGGGGSGAPLKIQAYFNETADLPCQFANSQNVSLSELVVFWQDQENLVLNEVYLGKEKFDSVHSKYMGRTSFDSDSWTLRLHNLQIKDKGLYQCIIIHKKPTGMIRIHQMNSELSVL

SEQ ID NO: 877 - protein, 660 aa, synthetic construct
  REGION 1..660: note = LAG3 R97E 97-156-sugemalimab antibody heavy chain -CD86 IgV-Q25F/H90I
ERYTVLSVGPGGLRSGRLPLQPRVQLDERGRQRGDFSLWLRPARRADAGEYRAAVHLRDRGGGGSGGGGSGGGGSGGGGSGEVQLLESGGGLVQPGGSLRLSCAASGFTFSSYAMSWVRQAPGKGLEWVSGISGSGGFTYYADSVKGRFTISRDNSKNTLYLQMNSLRAEDTAVYYCAKPPRGYNYGPFDYWGQGTLVTVSSASTKGPSVFPLAPCSRSTSESTAALGCLVKDYFPEPVTVSWNSGALTSGVHTFPAVLQSSGLYSLSSVVTVPSSSLGTKTYTCNVDHKPSNTKVDKRVESKYGPPCPPCPAPEFLGGPSVFLFPPKPKDTLMISRTPEVTCVVVDVSQEDPEVQFNWYVDGVEVHNAKTKPREEQFNSTYRVVSVLTVLHQDWLNGKEYKCKVSNKGLPSSIEKTISKAKGQPREPQVYTLPPSQEEMTKNQVSLTCLVKGFYPSDIAVEWESNGQPENNYKTTPPVLDSDGSFFLYSRLTVDKSRWQEGNVFSCSVMHEALHNHYTQKSLSLSLGAGGGGSGGGGSGGGGSGGGGSGAPLKIQAYFNETADLPCQFANSQNFSLSELVVFWQDQENLVLNEVYLGKEKFDSVHSKYMGRTSFDSDSWTLRLHNLQIKDKGLYQCIIIHKKPTGMIRIHQMNSELSVL

SEQ ID NO: 878 - protein, 660 aa, synthetic construct
  REGION 1..660: note = LAG3 R97E 97-156-sugemalimab antibody heavy chain -CD86 IgV-Q25F/H90V
ERYTVLSVGPGGLRSGRLPLQPRVQLDERGRQRGDFSLWLRPARRADAGEYRAAVHLRDRGGGGSGGGGSGGGGSGGGGSGEVQLLESGGGLVQPGGSLRLSCAASGFTFSSYAMSWVRQAPGKGLEWVSGISGSGGFTYYADSVKGRFTISRDNSKNTLYLQMNSLRAEDTAVYYCAKPPRGYNYGPFDYWGQGTLVTVSSASTKGPSVFPLAPCSRSTSESTAALGCLVKDYFPEPVTVSWNSGALTSGVHTFPAVLQSSGLYSLSSVVTVPSSSLGTKTYTCNVDHKPSNTKVDKRVESKYGPPCPPCPAPEFLGGPSVFLFPPKPKDTLMISRTPEVTCVVVDVSQEDPEVQFNWYVDGVEVHNAKTKPREEQFNSTYRVVSVLTVLHQDWLNGKEYKCKVSNKGLPSSIEKTISKAKGQPREPQVYTLPPSQEEMTKNQVSLTCLVKGFYPSDIAVEWESNGQPENNYKTTPPVLDSDGSFFLYSRLTVDKSRWQEGNVFSCSVMHEALHNHYTQKSLSLSLGAGGGGSGGGGSGGGGSGGGGSGAPLKIQAYFNETADLPCQFANSQNFSLSELVVFWQDQENLVLNEVYLGKEKFDSVHSKYMGRTSFDSDSWTLRLHNLQIKDKGLYQCIIVHKKPTGMIRIHQMNSELSVL

SEQ ID NO: 879 - protein, 660 aa, synthetic construct
  REGION 1..660: note = LAG3 R97E 97-156-sugemalimab antibody heavy chain -CD86 IgV-A13F/Q25I/F33L/H90I
ERYTVLSVGPGGLRSGRLPLQPRVQLDERGRQRGDFSLWLRPARRADAGEYRAAVHLRDRGGGGSGGGGSGGGGSGGGGSGEVQLLESGGGLVQPGGSLRLSCAASGFTFSSYAMSWVRQAPGKGLEWVSGISGSGGFTYYADSVKGRFTISRDNSKNTLYLQMNSLRAEDTAVYYCAKPPRGYNYGPFDYWGQGTLVTVSSASTKGPSVFPLAPCSRSTSESTAALGCLVKDYFPEPVTVSWNSGALTSGVHTFPAVLQSSGLYSLSSVVTVPSSSLGTKTYTCNVDHKPSNTKVDKRVESKYGPPCPPCPAPEFLGGPSVFLFPPKPKDTLMISRTPEVTCVVVDVSQEDPEVQFNWYVDGVEVHNAKTKPREEQFNSTYRVVSVLTVLHQDWLNGKEYKCKVSNKGLPSSIEKTISKAKGQPREPQVYTLPPSQEEMTKNQVSLTCLVKGFYPSDIAVEWESNGQPENNYKTTPPVLDSDGSFFLYSRLTVDKSRWQEGNVFSCSVMHEALHNHYTQKSLSLSLGAGGGGSGGGGSGGGGSGGGGSGAPLKIQAYFNETFDLPCQFANSQNISLSELVVLWQDQENLVLNEVYLGKEKFDSVHSKYMGRTSFDSDSWTLRLHNLQIKDKGLYQCIIIHKKPTGMIRIHQMNSELSVL

SEQ ID NO: 880 - protein, 660 aa, synthetic construct
  REGION 1..660: note = LAG3 R97E 97-156-sugemalimab antibody heavy chain -CD86 IgV-A13M/Q25I/F33L/H90I
ERYTVLSVGPGGLRSGRLPLQPRVQLDERGRQRGDFSLWLRPARRADAGEYRAAVHLRDRGGGGSGGGGSGGGGSGGGGSGEVQLLESGGGLVQPGGSLRLSCAASGFTFSSYAMSWVRQAPGKGLEWVSGISGSGGFTYYADSVKGRFTISRDNSKNTLYLQMNSLRAEDTAVYYCAKPPRGYNYGPFDYWGQGTLVTVSSASTKGPSVFPLAPCSRSTSESTAALGCLVKDYFPEPVTVSWNSGALTSGVHTFPAVLQSSGLYSLSSVVTVPSSSLGTKTYTCNVDHKPSNTKVDKRVESKYGPPCPPCPAPEFLGGPSVFLFPPKPKDTLMISRTPEVTCVVVDVSQEDPEVQFNWYVDGVEVHNAKTKPREEQFNSTYRVVSVLTVLHQDWLNGKEYKCKVSNKGLPSSIEKTISKAKGQPREPQVYTLPPSQEEMTKNQVSLTCLVKGFYPSDIAVEWESNGQPENNYKTTPPVLDSDGSFFLYSRLTVDKSRWQEGNVFSCSVMHEALHNHYTQKSLSLSLGAGGGGSGGGGSGGGGSGGGGSGAPLKIQAYFNETMDLPCQFANSQNISLSELVVLWQDQENLVLNEVYLGKEKFDSVHSKYMGRTSFDSDSWTLRLHNLQIKDKGLYQCIIIHKKPTGMIRIHQMNSELSVL

SEQ ID NO: 881 - protein, 660 aa, synthetic construct
  REGION 1..660: note = LAG3 R97E 97-156-sugemalimab antibody heavy chain -CD86 IgV-Q25A/F33L/H90I
ERYTVLSVGPGGLRSGRLPLQPRVQLDERGRQRGDFSLWLRPARRADAGEYRAAVHLRDRGGGGSGGGGSGGGGSGGGGSGEVQLLESGGGLVQPGGSLRLSCAASGFTFSSYAMSWVRQAPGKGLEWVSGISGSGGFTYYADSVKGRFTISRDNSKNTLYLQMNSLRAEDTAVYYCAKPPRGYNYGPFDYWGQGTLVTVSSASTKGPSVFPLAPCSRSTSESTAALGCLVKDYFPEPVTVSWNSGALTSGVHTFPAVLQSSGLYSLSSVVTVPSSSLGTKTYTCNVDHKPSNTKVDKRVESKYGPPCPPCPAPEFLGGPSVFLFPPKPKDTLMISRTPEVTCVVVDVSQEDPEVQFNWYVDGVEVHNAKTKPREEQFNSTYRVVSVLTVLHQDWLNGKEYKCKVSNKGLPSSIEKTISKAKGQPREPQVYTLPPSQEEMTKNQVSLTCLVKGFYPSDIAVEWESNGQPENNYKTTPPVLDSDGSFFLYSRLTVDKSRWQEGNVFSCSVMHEALHNHYTQKSLSLSLGAGGGGSGGGGSGGGGSGGGGSGAPLKIQAYFNETADLPCQFANSQNASLSELVVLWQDQENLVLNEVYLGKEKFDSVHSKYMGRTSFDSDSWTLRLHNLQIKDKGLYQCIIIHKKPTGMIRIHQMNSELSVL

SEQ ID NO: 882 - protein, 660 aa, synthetic construct
  REGION 1..660: note = LAG3 R97E 97-156-sugemalimab antibody heavy chain -CD86 IgV-Q25M/F33L/H90I
ERYTVLSVGPGGLRSGRLPLQPRVQLDERGRQRGDFSLWLRPARRADAGEYRAAVHLRDRGGGGSGGGGSGGGGSGGGGSGEVQLLESGGGLVQPGGSLRLSCAASGFTFSSYAMSWVRQAPGKGLEWVSGISGSGGFTYYADSVKGRFTISRDNSKNTLYLQMNSLRAEDTAVYYCAKPPRGYNYGPFDYWGQGTLVTVSSASTKGPSVFPLAPCSRSTSESTAALGCLVKDYFPEPVTVSWNSGALTSGVHTFPAVLQSSGLYSLSSVVTVPSSSLGTKTYTCNVDHKPSNTKVDKRVESKYGPPCPPCPAPEFLGGPSVFLFPPKPKDTLMISRTPEVTCVVVDVSQEDPEVQFNWYVDGVEVHNAKTKPREEQFNSTYRVVSVLTVLHQDWLNGKEYKCKVSNKGLPSSIEKTISKAKGQPREPQVYTLPPSQEEMTKNQVSLTCLVKGFYPSDIAVEWESNGQPENNYKTTPPVLDSDGSFFLYSRLTVDKSRWQEGNVFSCSVMHEALHNHYTQKSLSLSLGAGGGGSGGGGSGGGGSGGGGSGAPLKIQAYFNETADLPCQFANSQNMSLSELVVLWQDQENLVLNEVYLGKEKFDSVHSKYMGRTSFDSDSWTLRLHNLQIKDKGLYQCIIIHKKPTGMIRIHQMNSELSVL

SEQ ID NO: 883 - protein, 660 aa, synthetic construct
  REGION 1..660: note = LAG3 R97E 97-156-sugemalimab antibody heavy chain -CD86 IgV-Q25I/F33M/H90I
ERYTVLSVGPGGLRSGRLPLQPRVQLDERGRQRGDFSLWLRPARRADAGEYRAAVHLRDRGGGGSGGGGSGGGGSGGGGSGEVQLLESGGGLVQPGGSLRLSCAASGFTFSSYAMSWVRQAPGKGLEWVSGISGSGGFTYYADSVKGRFTISRDNSKNTLYLQMNSLRAEDTAVYYCAKPPRGYNYGPFDYWGQGTLVTVSSASTKGPSVFPLAPCSRSTSESTAALGCLVKDYFPEPVTVSWNSGALTSGVHTFPAVLQSSGLYSLSSVVTVPSSSLGTKTYTCNVDHKPSNTKVDKRVESKYGPPCPPCPAPEFLGGPSVFLFPPKPKDTLMISRTPEVTCVVVDVSQEDPEVQFNWYVDGVEVHNAKTKPREEQFNSTYRVVSVLTVLHQDWLNGKEYKCKVSNKGLPSSIEKTISKAKGQPREPQVYTLPPSQEEMTKNQVSLTCLVKGFYPSDIAVEWESNGQPENNYKTTPPVLDSDGSFFLYSRLTVDKSRWQEGNVFSCSVMHEALHNHYTQKSLSLSLGAGGGGSGGGGSGGGGSGGGGSGAPLKIQAYFNETADLPCQFANSQNISLSELVVMWQDQENLVLNEVYLGKEKFDSVHSKYMGRTSFDSDSWTLRLHNLQIKDKGLYQCIIIHKKPTGMIRIHQMNSELSVL

SEQ ID NO: 884 - protein, 660 aa, synthetic construct
  REGION 1..660: note = LAG3 R97E 97-156-sugemalimab antibody heavy chain -CD86 IgV-Q25I/F33L/I89V/H90I
ERYTVLSVGPGGLRSGRLPLQPRVQLDERGRQRGDFSLWLRPARRADAGEYRAAVHLRDRGGGGSGGGGSGGGGSGGGGSGEVQLLESGGGLVQPGGSLRLSCAASGFTFSSYAMSWVRQAPGKGLEWVSGISGSGGFTYYADSVKGRFTISRDNSKNTLYLQMNSLRAEDTAVYYCAKPPRGYNYGPFDYWGQGTLVTVSSASTKGPSVFPLAPCSRSTSESTAALGCLVKDYFPEPVTVSWNSGALTSGVHTFPAVLQSSGLYSLSSVVTVPSSSLGTKTYTCNVDHKPSNTKVDKRVESKYGPPCPPCPAPEFLGGPSVFLFPPKPKDTLMISRTPEVTCVVVDVSQEDPEVQFNWYVDGVEVHNAKTKPREEQFNSTYRVVSVLTVLHQDWLNGKEYKCKVSNKGLPSSIEKTISKAKGQPREPQVYTLPPSQEEMTKNQVSLTCLVKGFYPSDIAVEWESNGQPENNYKTTPPVLDSDGSFFLYSRLTVDKSRWQEGNVFSCSVMHEALHNHYTQKSLSLSLGAGGGGSGGGGSGGGGSGGGGSGAPLKIQAYFNETADLPCQFANSQNISLSELVVLWQDQENLVLNEVYLGKEKFDSVHSKYMGRTSFDSDSWTLRLHNLQIKDKGLYQCIVIHKKPTGMIRIHQMNSELSVL

SEQ ID NO: 885 - protein, 660 aa, synthetic construct
  REGION 1..660: note = LAG3 R97E 97-156-sugemalimab antibody heavy chain -CD86 IgV-Q25I/F33L/I89F/H90I
ERYTVLSVGPGGLRSGRLPLQPRVQLDERGRQRGDFSLWLRPARRADAGEYRAAVHLRDRGGGGSGGGGSGGGGSGGGGSGEVQLLESGGGLVQPGGSLRLSCAASGFTFSSYAMSWVRQAPGKGLEWVSGISGSGGFTYYADSVKGRFTISRDNSKNTLYLQMNSLRAEDTAVYYCAKPPRGYNYGPFDYWGQGTLVTVSSASTKGPSVFPLAPCSRSTSESTAALGCLVKDYFPEPVTVSWNSGALTSGVHTFPAVLQSSGLYSLSSVVTVPSSSLGTKTYTCNVDHKPSNTKVDKRVESKYGPPCPPCPAPEFLGGPSVFLFPPKPKDTLMISRTPEVTCVVVDVSQEDPEVQFNWYVDGVEVHNAKTKPREEQFNSTYRVVSVLTVLHQDWLNGKEYKCKVSNKGLPSSIEKTISKAKGQPREPQVYTLPPSQEEMTKNQVSLTCLVKGFYPSDIAVEWESNGQPENNYKTTPPVLDSDGSFFLYSRLTVDKSRWQEGNVFSCSVMHEALHNHYTQKSLSLSLGAGGGGSGGGGSGGGGSGGGGSGAPLKIQAYFNETADLPCQFANSQNISLSELVVLWQDQENLVLNEVYLGKEKFDSVHSKYMGRTSFDSDSWTLRLHNLQIKDKGLYQCIFIHKKPTGMIRIHQMNSELSVL

SEQ ID NO: 886 - protein, 660 aa, synthetic construct
  REGION 1..660: note = LAG3 R97E 97-156-sugemalimab antibody heavy chain -CD86 IgV-Q25I/F33L/I89M/H90I
ERYTVLSVGPGGLRSGRLPLQPRVQLDERGRQRGDFSLWLRPARRADAGEYRAAVHLRDRGGGGSGGGGSGGGGSGGGGSGEVQLLESGGGLVQPGGSLRLSCAASGFTFSSYAMSWVRQAPGKGLEWVSGISGSGGFTYYADSVKGRFTISRDNSKNTLYLQMNSLRAEDTAVYYCAKPPRGYNYGPFDYWGQGTLVTVSSASTKGPSVFPLAPCSRSTSESTAALGCLVKDYFPEPVTVSWNSGALTSGVHTFPAVLQSSGLYSLSSVVTVPSSSLGTKTYTCNVDHKPSNTKVDKRVESKYGPPCPPCPAPEFLGGPSVFLFPPKPKDTLMISRTPEVTCVVVDVSQEDPEVQFNWYVDGVEVHNAKTKPREEQFNSTYRVVSVLTVLHQDWLNGKEYKCKVSNKGLPSSIEKTISKAKGQPREPQVYTLPPSQEEMTKNQVSLTCLVKGFYPSDIAVEWESNGQPENNYKTTPPVLDSDGSFFLYSRLTVDKSRWQEGNVFSCSVMHEALHNHYTQKSLSLSLGAGGGGSGGGGSGGGGSGGGGSGAPLKIQAYFNETADLPCQFANSQNISLSELVVLWQDQENLVLNEVYLGKEKFDSVHSKYMGRTSFDSDSWTLRLHNLQIKDKGLYQCIMIHKKPTGMIRIHQMNSELSVL

SEQ ID NO: 887 - protein, 660 aa, synthetic construct
  REGION 1..660: note = LAG3 R97E 97-156-sugemalimab antibody heavy chain -CD86 IgV-Q25I/F33L/H90M
ERYTVLSVGPGGLRSGRLPLQPRVQLDERGRQRGDFSLWLRPARRADAGEYRAAVHLRDRGGGGSGGGGSGGGGSGGGGSGEVQLLESGGGLVQPGGSLRLSCAASGFTFSSYAMSWVRQAPGKGLEWVSGISGSGGFTYYADSVKGRFTISRDNSKNTLYLQMNSLRAEDTAVYYCAKPPRGYNYGPFDYWGQGTLVTVSSASTKGPSVFPLAPCSRSTSESTAALGCLVKDYFPEPVTVSWNSGALTSGVHTFPAVLQSSGLYSLSSVVTVPSSSLGTKTYTCNVDHKPSNTKVDKRVESKYGPPCPPCPAPEFLGGPSVFLFPPKPKDTLMISRTPEVTCVVVDVSQEDPEVQFNWYVDGVEVHNAKTKPREEQFNSTYRVVSVLTVLHQDWLNGKEYKCKVSNKGLPSSIEKTISKAKGQPREPQVYTLPPSQEEMTKNQVSLTCLVKGFYPSDIAVEWESNGQPENNYKTTPPVLDSDGSFFLYSRLTVDKSRWQEGNVFSCSVMHEALHNHYTQKSLSLSLGAGGGGSGGGGSGGGGSGGGGSGAPLKIQAYFNETADLPCQFANSQNISLSELVVLWQDQENLVLNEVYLGKEKFDSVHSKYMGRTSFDSDSWTLRLHNLQIKDKGLYQCIIMHKKPTGMIRIHQMNSELSVL

SEQ ID NO: 888 - protein, 660 aa, synthetic construct
  REGION 1..660: note = LAG3 R97E 97-156-sugemalimab antibody heavy chain -CD86 IgV
ERYTVLSVGPGGLRSGRLPLQPRVQLDERGRQRGDFSLWLRPARRADAGEYRAAVHLRDRGGGGSGGGGSGGGGSGGGGSGEVQLLESGGGLVQPGGSLRLSCAASGFTFSSYAMSWVRQAPGKGLEWVSGISGSGGFTYYADSVKGRFTISRDNSKNTLYLQMNSLRAEDTAVYYCAKPPRGYNYGPFDYWGQGTLVTVSSASTKGPSVFPLAPCSRSTSESTAALGCLVKDYFPEPVTVSWNSGALTSGVHTFPAVLQSSGLYSLSSVVTVPSSSLGTKTYTCNVDHKPSNTKVDKRVESKYGPPCPPCPAPEFLGGPSVFLFPPKPKDTLMISRTPEVTCVVVDVSQEDPEVQFNWYVDGVEVHNAKTKPREEQFNSTYRVVSVLTVLHQDWLNGKEYKCKVSNKGLPSSIEKTISKAKGQPREPQVYTLPPSQEEMTKNQVSLTCLVKGFYPSDIAVEWESNGQPENNYKTTPPVLDSDGSFFLYSRLTVDKSRWQEGNVFSCSVMHEALHNHYTQKSLSLSLGAGGGGSGGGGSGGGGSGGGGSGAPLKIQAYFNETADLPCQFANSQNQSLSELVVFWQDQENLVLNEVYLGKEKFDSVHSKYMGRTSFDSDSWTLRLHNLQIKDKGLYQCIIHHKKPTGMIRIHQMNSELSVL

SEQ ID NO: 889 - protein, 660 aa, synthetic construct
  REGION 1..660: note = LAG3 97-156-atezolizumab antibody heavy chain -CD86 IgV-Q25I/F33L/H90I
RRYTVLSVGPGGLRSGRLPLQPRVQLDERGRQRGDFSLWLRPARRADAGEYRAAVHLRDRGGGGSGGGGSGGGGSGGGGSGEVQLVESGGGLVQPGGSLRLSCAASGFTFSDSWIHWVRQAPGKGLEWVAWISPYGGSTYYADSVKGRFTISADTSKNTAYLQMNSLRAEDTAVYYCARRHWPGGFDYWGQGTLVTVSSASTKGPSVFPLAPSSKSTSGGTAALGCLVKDYFPEPVTVSWNSGALTSGVHTFPAVLQSSGLYSLSSVVTVPSSSLGTQTYICNVNHKPSNTKVDKKVEPKSCDKTHTCPPCPAPELLGGPSVFLFPPKPKDTLMISRTPEVTCVVVDVSHEDPEVKFNWYVDGVEVHNAKTKPREEQYASTYRVVSVLTVLHQDWLNGKEYKCKVSNKALPAPIEKTISKAKGQPREPQVYTLPPSREEMTKNQVSLTCLVKGFYPSDIAVEWESNGQPENNYKTTPPVLDSDGSFFLYSKLTVDKSRWQQGNVFSCSVMHEALHNHYTQKSLSLSPGAGGGGSGGGGSGGGGSGGGGSGAPLKIQAYFNETADLPCQFANSQNISLSELVVLWQDQENLVLNEVYLGKEKFDSVHSKYMGRTSFDSDSWTLRLHNLQIKDKGLYQCIIIHKKPTGMIRIHQMNSELSVL

SEQ ID NO: 890 - protein, 660 aa, synthetic construct
  REGION 1..660: note = LAG3 97-156-atezolizumab antibody heavy chain -CD86 IgV-Q25V/F33L/H90I
RRYTVLSVGPGGLRSGRLPLQPRVQLDERGRQRGDFSLWLRPARRADAGEYRAAVHLRDRGGGGSGGGGSGGGGSGGGGSGEVQLVESGGGLVQPGGSLRLSCAASGFTFSDSWIHWVRQAPGKGLEWVAWISPYGGSTYYADSVKGRFTISADTSKNTAYLQMNSLRAEDTAVYYCARRHWPGGFDYWGQGTLVTVSSASTKGPSVFPLAPSSKSTSGGTAALGCLVKDYFPEPVTVSWNSGALTSGVHTFPAVLQSSGLYSLSSVVTVPSSSLGTQTYICNVNHKPSNTKVDKKVEPKSCDKTHTCPPCPAPELLGGPSVFLFPPKPKDTLMISRTPEVTCVVVDVSHEDPEVKFNWYVDGVEVHNAKTKPREEQYASTYRVVSVLTVLHQDWLNGKEYKCKVSNKALPAPIEKTISKAKGQPREPQVYTLPPSREEMTKNQVSLTCLVKGFYPSDIAVEWESNGQPENNYKTTPPVLDSDGSFFLYSKLTVDKSRWQQGNVFSCSVMHEALHNHYTQKSLSLSPGAGGGGSGGGGSGGGGSGGGGSGAPLKIQAYFNETADLPCQFANSQNVSLSELVVLWQDQENLVLNEVYLGKEKFDSVHSKYMGRTSFDSDSWTLRLHNLQIKDKGLYQCIIIHKKPTGMIRIHQMNSELSVL

SEQ ID NO: 891 - protein, 660 aa, synthetic construct
  REGION 1..660: note = LAG3 97-156-atezolizumab antibody heavy chain -CD86 IgV-Q25I/F33V/H90I
RRYTVLSVGPGGLRSGRLPLQPRVQLDERGRQRGDFSLWLRPARRADAGEYRAAVHLRDRGGGGSGGGGSGGGGSGGGGSGEVQLVESGGGLVQPGGSLRLSCAASGFTFSDSWIHWVRQAPGKGLEWVAWISPYGGSTYYADSVKGRFTISADTSKNTAYLQMNSLRAEDTAVYYCARRHWPGGFDYWGQGTLVTVSSASTKGPSVFPLAPSSKSTSGGTAALGCLVKDYFPEPVTVSWNSGALTSGVHTFPAVLQSSGLYSLSSVVTVPSSSLGTQTYICNVNHKPSNTKVDKKVEPKSCDKTHTCPPCPAPELLGGPSVFLFPPKPKDTLMISRTPEVTCVVVDVSHEDPEVKFNWYVDGVEVHNAKTKPREEQYASTYRVVSVLTVLHQDWLNGKEYKCKVSNKALPAPIEKTISKAKGQPREPQVYTLPPSREEMTKNQVSLTCLVKGFYPSDIAVEWESNGQPENNYKTTPPVLDSDGSFFLYSKLTVDKSRWQQGNVFSCSVMHEALHNHYTQKSLSLSPGAGGGGSGGGGSGGGGSGGGGSGAPLKIQAYFNETADLPCQFANSQNISLSELVVVWQDQENLVLNEVYLGKEKFDSVHSKYMGRTSFDSDSWTLRLHNLQIKDKGLYQCIIIHKKPTGMIRIHQMNSELSVL

SEQ ID NO: 892 - protein, 660 aa, synthetic construct
  REGION 1..660: note = LAG3 97-156-atezolizumab antibody heavy chain -CD86 IgV-Q25V/F33V/H90I
RRYTVLSVGPGGLRSGRLPLQPRVQLDERGRQRGDFSLWLRPARRADAGEYRAAVHLRDRGGGGSGGGGSGGGGSGGGGSGEVQLVESGGGLVQPGGSLRLSCAASGFTFSDSWIHWVRQAPGKGLEWVAWISPYGGSTYYADSVKGRFTISADTSKNTAYLQMNSLRAEDTAVYYCARRHWPGGFDYWGQGTLVTVSSASTKGPSVFPLAPSSKSTSGGTAALGCLVKDYFPEPVTVSWNSGALTSGVHTFPAVLQSSGLYSLSSVVTVPSSSLGTQTYICNVNHKPSNTKVDKKVEPKSCDKTHTCPPCPAPELLGGPSVFLFPPKPKDTLMISRTPEVTCVVVDVSHEDPEVKFNWYVDGVEVHNAKTKPREEQYASTYRVVSVLTVLHQDWLNGKEYKCKVSNKALPAPIEKTISKAKGQPREPQVYTLPPSREEMTKNQVSLTCLVKGFYPSDIAVEWESNGQPENNYKTTPPVLDSDGSFFLYSKLTVDKSRWQQGNVFSCSVMHEALHNHYTQKSLSLSPGAGGGGSGGGGSGGGGSGGGGSGAPLKIQAYFNETADLPCQFANSQNVSLSELVVVWQDQENLVLNEVYLGKEKFDSVHSKYMGRTSFDSDSWTLRLHNLQIKDKGLYQCIIIHKKPTGMIRIHQMNSELSVL

SEQ ID NO: 893 - protein, 660 aa, synthetic construct
  REGION 1..660: note = LAG3 97-156-atezolizumab antibody heavy chain -CD86 IgV-Q25I/F33L/H90V
RRYTVLSVGPGGLRSGRLPLQPRVQLDERGRQRGDFSLWLRPARRADAGEYRAAVHLRDRGGGGSGGGGSGGGGSGGGGSGEVQLVESGGGLVQPGGSLRLSCAASGFTFSDSWIHWVRQAPGKGLEWVAWISPYGGSTYYADSVKGRFTISADTSKNTAYLQMNSLRAEDTAVYYCARRHWPGGFDYWGQGTLVTVSSASTKGPSVFPLAPSSKSTSGGTAALGCLVKDYFPEPVTVSWNSGALTSGVHTFPAVLQSSGLYSLSSVVTVPSSSLGTQTYICNVNHKPSNTKVDKKVEPKSCDKTHTCPPCPAPELLGGPSVFLFPPKPKDTLMISRTPEVTCVVVDVSHEDPEVKFNWYVDGVEVHNAKTKPREEQYASTYRVVSVLTVLHQDWLNGKEYKCKVSNKALPAPIEKTISKAKGQPREPQVYTLPPSREEMTKNQVSLTCLVKGFYPSDIAVEWESNGQPENNYKTTPPVLDSDGSFFLYSKLTVDKSRWQQGNVFSCSVMHEALHNHYTQKSLSLSPGAGGGGSGGGGSGGGGSGGGGSGAPLKIQAYFNETADLPCQFANSQNISLSELVVLWQDQENLVLNEVYLGKEKFDSVHSKYMGRTSFDSDSWTLRLHNLQIKDKGLYQCIIVHKKPTGMIRIHQMNSELSVL

SEQ ID NO: 894 - protein, 660 aa, synthetic construct
  REGION 1..660: note = LAG3 97-156-atezolizumab antibody heavy chain -CD86 IgV-Q25V/F33L/H90V
RRYTVLSVGPGGLRSGRLPLQPRVQLDERGRQRGDFSLWLRPARRADAGEYRAAVHLRDRGGGGSGGGGSGGGGSGGGGSGEVQLVESGGGLVQPGGSLRLSCAASGFTFSDSWIHWVRQAPGKGLEWVAWISPYGGSTYYADSVKGRFTISADTSKNTAYLQMNSLRAEDTAVYYCARRHWPGGFDYWGQGTLVTVSSASTKGPSVFPLAPSSKSTSGGTAALGCLVKDYFPEPVTVSWNSGALTSGVHTFPAVLQSSGLYSLSSVVTVPSSSLGTQTYICNVNHKPSNTKVDKKVEPKSCDKTHTCPPCPAPELLGGPSVFLFPPKPKDTLMISRTPEVTCVVVDVSHEDPEVKFNWYVDGVEVHNAKTKPREEQYASTYRVVSVLTVLHQDWLNGKEYKCKVSNKALPAPIEKTISKAKGQPREPQVYTLPPSREEMTKNQVSLTCLVKGFYPSDIAVEWESNGQPENNYKTTPPVLDSDGSFFLYSKLTVDKSRWQQGNVFSCSVMHEALHNHYTQKSLSLSPGAGGGGSGGGGSGGGGSGGGGSGAPLKIQAYFNETADLPCQFANSQNVSLSELVVLWQDQENLVLNEVYLGKEKFDSVHSKYMGRTSFDSDSWTLRLHNLQIKDKGLYQCIIVHKKPTGMIRIHQMNSELSVL

SEQ ID NO: 895 - protein, 660 aa, synthetic construct
  REGION 1..660: note = LAG3 97-156-atezolizumab antibody heavy chain -CD86 IgV-Q25I/F33V/H90V
RRYTVLSVGPGGLRSGRLPLQPRVQLDERGRQRGDFSLWLRPARRADAGEYRAAVHLRDRGGGGSGGGGSGGGGSGGGGSGEVQLVESGGGLVQPGGSLRLSCAASGFTFSDSWIHWVRQAPGKGLEWVAWISPYGGSTYYADSVKGRFTISADTSKNTAYLQMNSLRAEDTAVYYCARRHWPGGFDYWGQGTLVTVSSASTKGPSVFPLAPSSKSTSGGTAALGCLVKDYFPEPVTVSWNSGALTSGVHTFPAVLQSSGLYSLSSVVTVPSSSLGTQTYICNVNHKPSNTKVDKKVEPKSCDKTHTCPPCPAPELLGGPSVFLFPPKPKDTLMISRTPEVTCVVVDVSHEDPEVKFNWYVDGVEVHNAKTKPREEQYASTYRVVSVLTVLHQDWLNGKEYKCKVSNKALPAPIEKTISKAKGQPREPQVYTLPPSREEMTKNQVSLTCLVKGFYPSDIAVEWESNGQPENNYKTTPPVLDSDGSFFLYSKLTVDKSRWQQGNVFSCSVMHEALHNHYTQKSLSLSPGAGGGGSGGGGSGGGGSGGGGSGAPLKIQAYFNETADLPCQFANSQNISLSELVVVWQDQENLVLNEVYLGKEKFDSVHSKYMGRTSFDSDSWTLRLHNLQIKDKGLYQCIIVHKKPTGMIRIHQMNSELSVL

SEQ ID NO: 896 - protein, 660 aa, synthetic construct
  REGION 1..660: note = LAG3 97-156-atezolizumab antibody heavy chain -CD86 IgV-Q25V/F33V/H90V
RRYTVLSVGPGGLRSGRLPLQPRVQLDERGRQRGDFSLWLRPARRADAGEYRAAVHLRDRGGGGSGGGGSGGGGSGGGGSGEVQLVESGGGLVQPGGSLRLSCAASGFTFSDSWIHWVRQAPGKGLEWVAWISPYGGSTYYADSVKGRFTISADTSKNTAYLQMNSLRAEDTAVYYCARRHWPGGFDYWGQGTLVTVSSASTKGPSVFPLAPSSKSTSGGTAALGCLVKDYFPEPVTVSWNSGALTSGVHTFPAVLQSSGLYSLSSVVTVPSSSLGTQTYICNVNHKPSNTKVDKKVEPKSCDKTHTCPPCPAPELLGGPSVFLFPPKPKDTLMISRTPEVTCVVVDVSHEDPEVKFNWYVDGVEVHNAKTKPREEQYASTYRVVSVLTVLHQDWLNGKEYKCKVSNKALPAPIEKTISKAKGQPREPQVYTLPPSREEMTKNQVSLTCLVKGFYPSDIAVEWESNGQPENNYKTTPPVLDSDGSFFLYSKLTVDKSRWQQGNVFSCSVMHEALHNHYTQKSLSLSPGAGGGGSGGGGSGGGGSGGGGSGAPLKIQAYFNETADLPCQFANSQNVSLSELVVVWQDQENLVLNEVYLGKEKFDSVHSKYMGRTSFDSDSWTLRLHNLQIKDKGLYQCIIVHKKPTGMIRIHQMNSELSVL

SEQ ID NO: 897 - protein, 660 aa, synthetic construct
  REGION 1..660: note = LAG3 97-156-atezolizumab antibody heavy chain -CD86 IgV-A13L/Q25I/F33L/H90I
RRYTVLSVGPGGLRSGRLPLQPRVQLDERGRQRGDFSLWLRPARRADAGEYRAAVHLRDRGGGGSGGGGSGGGGSGGGGSGEVQLVESGGGLVQPGGSLRLSCAASGFTFSDSWIHWVRQAPGKGLEWVAWISPYGGSTYYADSVKGRFTISADTSKNTAYLQMNSLRAEDTAVYYCARRHWPGGFDYWGQGTLVTVSSASTKGPSVFPLAPSSKSTSGGTAALGCLVKDYFPEPVTVSWNSGALTSGVHTFPAVLQSSGLYSLSSVVTVPSSSLGTQTYICNVNHKPSNTKVDKKVEPKSCDKTHTCPPCPAPELLGGPSVFLFPPKPKDTLMISRTPEVTCVVVDVSHEDPEVKFNWYVDGVEVHNAKTKPREEQYASTYRVVSVLTVLHQDWLNGKEYKCKVSNKALPAPIEKTISKAKGQPREPQVYTLPPSREEMTKNQVSLTCLVKGFYPSDIAVEWESNGQPENNYKTTPPVLDSDGSFFLYSKLTVDKSRWQQGNVFSCSVMHEALHNHYTQKSLSLSPGAGGGGSGGGGSGGGGSGGGGSGAPLKIQAYFNETLDLPCQFANSQNISLSELVVLWQDQENLVLNEVYLGKEKFDSVHSKYMGRTSFDSDSWTLRLHNLQIKDKGLYQCIIIHKKPTGMIRIHQMNSELSVL

SEQ ID NO: 898 - protein, 660 aa, synthetic construct
  REGION 1..660: note = LAG3 97-156-atezolizumab antibody heavy chain -CD86 IgV-A13I/Q25I/F33L/H90I
RRYTVLSVGPGGLRSGRLPLQPRVQLDERGRQRGDFSLWLRPARRADAGEYRAAVHLRDRGGGGSGGGGSGGGGSGGGGSGEVQLVESGGGLVQPGGSLRLSCAASGFTFSDSWIHWVRQAPGKGLEWVAWISPYGGSTYYADSVKGRFTISADTSKNTAYLQMNSLRAEDTAVYYCARRHWPGGFDYWGQGTLVTVSSASTKGPSVFPLAPSSKSTSGGTAALGCLVKDYFPEPVTVSWNSGALTSGVHTFPAVLQSSGLYSLSSVVTVPSSSLGTQTYICNVNHKPSNTKVDKKVEPKSCDKTHTCPPCPAPELLGGPSVFLFPPKPKDTLMISRTPEVTCVVVDVSHEDPEVKFNWYVDGVEVHNAKTKPREEQYASTYRVVSVLTVLHQDWLNGKEYKCKVSNKALPAPIEKTISKAKGQPREPQVYTLPPSREEMTKNQVSLTCLVKGFYPSDIAVEWESNGQPENNYKTTPPVLDSDGSFFLYSKLTVDKSRWQQGNVFSCSVMHEALHNHYTQKSLSLSPGAGGGGSGGGGSGGGGSGGGGSGAPLKIQAYFNETIDLPCQFANSQNISLSELVVLWQDQENLVLNEVYLGKEKFDSVHSKYMGRTSFDSDSWTLRLHNLQIKDKGLYQCIIIHKKPTGMIRIHQMNSELSVL

SEQ ID NO: 899 - protein, 660 aa, synthetic construct
  REGION 1..660: note = LAG3 97-156-atezolizumab antibody heavy chain -CD86 IgV-A13L/Q25V/F33L/H90I
RRYTVLSVGPGGLRSGRLPLQPRVQLDERGRQRGDFSLWLRPARRADAGEYRAAVHLRDRGGGGSGGGGSGGGGSGGGGSGEVQLVESGGGLVQPGGSLRLSCAASGFTFSDSWIHWVRQAPGKGLEWVAWISPYGGSTYYADSVKGRFTISADTSKNTAYLQMNSLRAEDTAVYYCARRHWPGGFDYWGQGTLVTVSSASTKGPSVFPLAPSSKSTSGGTAALGCLVKDYFPEPVTVSWNSGALTSGVHTFPAVLQSSGLYSLSSVVTVPSSSLGTQTYICNVNHKPSNTKVDKKVEPKSCDKTHTCPPCPAPELLGGPSVFLFPPKPKDTLMISRTPEVTCVVVDVSHEDPEVKFNWYVDGVEVHNAKTKPREEQYASTYRVVSVLTVLHQDWLNGKEYKCKVSNKALPAPIEKTISKAKGQPREPQVYTLPPSREEMTKNQVSLTCLVKGFYPSDIAVEWESNGQPENNYKTTPPVLDSDGSFFLYSKLTVDKSRWQQGNVFSCSVMHEALHNHYTQKSLSLSPGAGGGGSGGGGSGGGGSGGGGSGAPLKIQAYFNETLDLPCQFANSQNVSLSELVVLWQDQENLVLNEVYLGKEKFDSVHSKYMGRTSFDSDSWTLRLHNLQIKDKGLYQCIIIHKKPTGMIRIHQMNSELSVL

SEQ ID NO: 900 - protein, 660 aa, synthetic construct
  REGION 1..660: note = LAG3 97-156-atezolizumab antibody heavy chain -CD86 IgV-A13I/Q25V/F33L/H90I
RRYTVLSVGPGGLRSGRLPLQPRVQLDERGRQRGDFSLWLRPARRADAGEYRAAVHLRDRGGGGSGGGGSGGGGSGGGGSGEVQLVESGGGLVQPGGSLRLSCAASGFTFSDSWIHWVRQAPGKGLEWVAWISPYGGSTYYADSVKGRFTISADTSKNTAYLQMNSLRAEDTAVYYCARRHWPGGFDYWGQGTLVTVSSASTKGPSVFPLAPSSKSTSGGTAALGCLVKDYFPEPVTVSWNSGALTSGVHTFPAVLQSSGLYSLSSVVTVPSSSLGTQTYICNVNHKPSNTKVDKKVEPKSCDKTHTCPPCPAPELLGGPSVFLFPPKPKDTLMISRTPEVTCVVVDVSHEDPEVKFNWYVDGVEVHNAKTKPREEQYASTYRVVSVLTVLHQDWLNGKEYKCKVSNKALPAPIEKTISKAKGQPREPQVYTLPPSREEMTKNQVSLTCLVKGFYPSDIAVEWESNGQPENNYKTTPPVLDSDGSFFLYSKLTVDKSRWQQGNVFSCSVMHEALHNHYTQKSLSLSPGAGGGGSGGGGSGGGGSGGGGSGAPLKIQAYFNETIDLPCQFANSQNVSLSELVVLWQDQENLVLNEVYLGKEKFDSVHSKYMGRTSFDSDSWTLRLHNLQIKDKGLYQCIIIHKKPTGMIRIHQMNSELSVL

SEQ ID NO: 901 - protein, 660 aa, synthetic construct
  REGION 1..660: note = LAG3 97-156-atezolizumab antibody heavy chain -CD86 IgV-Q25I/F33L/I89L/H90I
RRYTVLSVGPGGLRSGRLPLQPRVQLDERGRQRGDFSLWLRPARRADAGEYRAAVHLRDRGGGGSGGGGSGGGGSGGGGSGEVQLVESGGGLVQPGGSLRLSCAASGFTFSDSWIHWVRQAPGKGLEWVAWISPYGGSTYYADSVKGRFTISADTSKNTAYLQMNSLRAEDTAVYYCARRHWPGGFDYWGQGTLVTVSSASTKGPSVFPLAPSSKSTSGGTAALGCLVKDYFPEPVTVSWNSGALTSGVHTFPAVLQSSGLYSLSSVVTVPSSSLGTQTYICNVNHKPSNTKVDKKVEPKSCDKTHTCPPCPAPELLGGPSVFLFPPKPKDTLMISRTPEVTCVVVDVSHEDPEVKFNWYVDGVEVHNAKTKPREEQYASTYRVVSVLTVLHQDWLNGKEYKCKVSNKALPAPIEKTISKAKGQPREPQVYTLPPSREEMTKNQVSLTCLVKGFYPSDIAVEWESNGQPENNYKTTPPVLDSDGSFFLYSKLTVDKSRWQQGNVFSCSVMHEALHNHYTQKSLSLSPGAGGGGSGGGGSGGGGSGGGGSGAPLKIQAYFNETADLPCQFANSQNISLSELVVLWQDQENLVLNEVYLGKEKFDSVHSKYMGRTSFDSDSWTLRLHNLQIKDKGLYQCILIHKKPTGMIRIHQMNSELSVL

SEQ ID NO: 902 - protein, 660 aa, synthetic construct
  REGION 1..660: note = LAG3 97-156-atezolizumab antibody heavy chain -CD86 IgV-Q25I/F33L/M60R/H90I
RRYTVLSVGPGGLRSGRLPLQPRVQLDERGRQRGDFSLWLRPARRADAGEYRAAVHLRDRGGGGSGGGGSGGGGSGGGGSGEVQLVESGGGLVQPGGSLRLSCAASGFTFSDSWIHWVRQAPGKGLEWVAWISPYGGSTYYADSVKGRFTISADTSKNTAYLQMNSLRAEDTAVYYCARRHWPGGFDYWGQGTLVTVSSASTKGPSVFPLAPSSKSTSGGTAALGCLVKDYFPEPVTVSWNSGALTSGVHTFPAVLQSSGLYSLSSVVTVPSSSLGTQTYICNVNHKPSNTKVDKKVEPKSCDKTHTCPPCPAPELLGGPSVFLFPPKPKDTLMISRTPEVTCVVVDVSHEDPEVKFNWYVDGVEVHNAKTKPREEQYASTYRVVSVLTVLHQDWLNGKEYKCKVSNKALPAPIEKTISKAKGQPREPQVYTLPPSREEMTKNQVSLTCLVKGFYPSDIAVEWESNGQPENNYKTTPPVLDSDGSFFLYSKLTVDKSRWQQGNVFSCSVMHEALHNHYTQKSLSLSPGAGGGGSGGGGSGGGGSGGGGSGAPLKIQAYFNETADLPCQFANSQNISLSELVVLWQDQENLVLNEVYLGKEKFDSVHSKYRGRTSFDSDSWTLRLHNLQIKDKGLYQCIIIHKKPTGMIRIHQMNSELSVL

SEQ ID NO: 903 - protein, 660 aa, synthetic construct
  REGION 1..660: note = LAG3 97-156-atezolizumab antibody heavy chain -CD86 IgV-Q25V/F33L/I89L/H90I
RRYTVLSVGPGGLRSGRLPLQPRVQLDERGRQRGDFSLWLRPARRADAGEYRAAVHLRDRGGGGSGGGGSGGGGSGGGGSGEVQLVESGGGLVQPGGSLRLSCAASGFTFSDSWIHWVRQAPGKGLEWVAWISPYGGSTYYADSVKGRFTISADTSKNTAYLQMNSLRAEDTAVYYCARRHWPGGFDYWGQGTLVTVSSASTKGPSVFPLAPSSKSTSGGTAALGCLVKDYFPEPVTVSWNSGALTSGVHTFPAVLQSSGLYSLSSVVTVPSSSLGTQTYICNVNHKPSNTKVDKKVEPKSCDKTHTCPPCPAPELLGGPSVFLFPPKPKDTLMISRTPEVTCVVVDVSHEDPEVKFNWYVDGVEVHNAKTKPREEQYASTYRVVSVLTVLHQDWLNGKEYKCKVSNKALPAPIEKTISKAKGQPREPQVYTLPPSREEMTKNQVSLTCLVKGFYPSDIAVEWESNGQPENNYKTTPPVLDSDGSFFLYSKLTVDKSRWQQGNVFSCSVMHEALHNHYTQKSLSLSPGAGGGGSGGGGSGGGGSGGGGSGAPLKIQAYFNETADLPCQFANSQNVSLSELVVLWQDQENLVLNEVYLGKEKFDSVHSKYMGRTSFDSDSWTLRLHNLQIKDKGLYQCILIHKKPTGMIRIHQMNSELSVL

SEQ ID NO: 904 - protein, 660 aa, synthetic construct
  REGION 1..660: note = LAG3 97-156-atezolizumab antibody heavy chain -CD86 IgV-Q25V/F33L/M60R/H90I
RRYTVLSVGPGGLRSGRLPLQPRVQLDERGRQRGDFSLWLRPARRADAGEYRAAVHLRDRGGGGSGGGGSGGGGSGGGGSGEVQLVESGGGLVQPGGSLRLSCAASGFTFSDSWIHWVRQAPGKGLEWVAWISPYGGSTYYADSVKGRFTISADTSKNTAYLQMNSLRAEDTAVYYCARRHWPGGFDYWGQGTLVTVSSASTKGPSVFPLAPSSKSTSGGTAALGCLVKDYFPEPVTVSWNSGALTSGVHTFPAVLQSSGLYSLSSVVTVPSSSLGTQTYICNVNHKPSNTKVDKKVEPKSCDKTHTCPPCPAPELLGGPSVFLFPPKPKDTLMISRTPEVTCVVVDVSHEDPEVKFNWYVDGVEVHNAKTKPREEQYASTYRVVSVLTVLHQDWLNGKEYKCKVSNKALPAPIEKTISKAKGQPREPQVYTLPPSREEMTKNQVSLTCLVKGFYPSDIAVEWESNGQPENNYKTTPPVLDSDGSFFLYSKLTVDKSRWQQGNVFSCSVMHEALHNHYTQKSLSLSPGAGGGGSGGGGSGGGGSGGGGSGAPLKIQAYFNETADLPCQFANSQNVSLSELVVLWQDQENLVLNEVYLGKEKFDSVHSKYRGRTSFDSDSWTLRLHNLQIKDKGLYQCIIIHKKPTGMIRIHQMNSELSVL

SEQ ID NO: 905 - protein, 660 aa, synthetic construct
  REGION 1..660: note = LAG3 97-156-atezolizumab antibody heavy chain -CD86 IgV-Q25F/F33L/H90I
RRYTVLSVGPGGLRSGRLPLQPRVQLDERGRQRGDFSLWLRPARRADAGEYRAAVHLRDRGGGGSGGGGSGGGGSGGGGSGEVQLVESGGGLVQPGGSLRLSCAASGFTFSDSWIHWVRQAPGKGLEWVAWISPYGGSTYYADSVKGRFTISADTSKNTAYLQMNSLRAEDTAVYYCARRHWPGGFDYWGQGTLVTVSSASTKGPSVFPLAPSSKSTSGGTAALGCLVKDYFPEPVTVSWNSGALTSGVHTFPAVLQSSGLYSLSSVVTVPSSSLGTQTYICNVNHKPSNTKVDKKVEPKSCDKTHTCPPCPAPELLGGPSVFLFPPKPKDTLMISRTPEVTCVVVDVSHEDPEVKFNWYVDGVEVHNAKTKPREEQYASTYRVVSVLTVLHQDWLNGKEYKCKVSNKALPAPIEKTISKAKGQPREPQVYTLPPSREEMTKNQVSLTCLVKGFYPSDIAVEWESNGQPENNYKTTPPVLDSDGSFFLYSKLTVDKSRWQQGNVFSCSVMHEALHNHYTQKSLSLSPGAGGGGSGGGGSGGGGSGGGGSGAPLKIQAYFNETADLPCQFANSQNFSLSELVVLWQDQENLVLNEVYLGKEKFDSVHSKYMGRTSFDSDSWTLRLHNLQIKDKGLYQCIIIHKKPTGMIRIHQMNSELSVL

SEQ ID NO: 906 - protein, 660 aa, synthetic construct
  REGION 1..660: note = LAG3 97-156-atezolizumab antibody heavy chain -CD86 IgV-Q25I/F33L/H90F
RRYTVLSVGPGGLRSGRLPLQPRVQLDERGRQRGDFSLWLRPARRADAGEYRAAVHLRDRGGGGSGGGGSGGGGSGGGGSGEVQLVESGGGLVQPGGSLRLSCAASGFTFSDSWIHWVRQAPGKGLEWVAWISPYGGSTYYADSVKGRFTISADTSKNTAYLQMNSLRAEDTAVYYCARRHWPGGFDYWGQGTLVTVSSASTKGPSVFPLAPSSKSTSGGTAALGCLVKDYFPEPVTVSWNSGALTSGVHTFPAVLQSSGLYSLSSVVTVPSSSLGTQTYICNVNHKPSNTKVDKKVEPKSCDKTHTCPPCPAPELLGGPSVFLFPPKPKDTLMISRTPEVTCVVVDVSHEDPEVKFNWYVDGVEVHNAKTKPREEQYASTYRVVSVLTVLHQDWLNGKEYKCKVSNKALPAPIEKTISKAKGQPREPQVYTLPPSREEMTKNQVSLTCLVKGFYPSDIAVEWESNGQPENNYKTTPPVLDSDGSFFLYSKLTVDKSRWQQGNVFSCSVMHEALHNHYTQKSLSLSPGAGGGGSGGGGSGGGGSGGGGSGAPLKIQAYFNETADLPCQFANSQNISLSELVVLWQDQENLVLNEVYLGKEKFDSVHSKYMGRTSFDSDSWTLRLHNLQIKDKGLYQCIIFHKKPTGMIRIHQMNSELSVL

SEQ ID NO: 907 - protein, 660 aa, synthetic construct
  REGION 1..660: note = LAG3 97-156-atezolizumab antibody heavy chain -CD86 IgV-Q25I/F33A/H90I
RRYTVLSVGPGGLRSGRLPLQPRVQLDERGRQRGDFSLWLRPARRADAGEYRAAVHLRDRGGGGSGGGGSGGGGSGGGGSGEVQLVESGGGLVQPGGSLRLSCAASGFTFSDSWIHWVRQAPGKGLEWVAWISPYGGSTYYADSVKGRFTISADTSKNTAYLQMNSLRAEDTAVYYCARRHWPGGFDYWGQGTLVTVSSASTKGPSVFPLAPSSKSTSGGTAALGCLVKDYFPEPVTVSWNSGALTSGVHTFPAVLQSSGLYSLSSVVTVPSSSLGTQTYICNVNHKPSNTKVDKKVEPKSCDKTHTCPPCPAPELLGGPSVFLFPPKPKDTLMISRTPEVTCVVVDVSHEDPEVKFNWYVDGVEVHNAKTKPREEQYASTYRVVSVLTVLHQDWLNGKEYKCKVSNKALPAPIEKTISKAKGQPREPQVYTLPPSREEMTKNQVSLTCLVKGFYPSDIAVEWESNGQPENNYKTTPPVLDSDGSFFLYSKLTVDKSRWQQGNVFSCSVMHEALHNHYTQKSLSLSPGAGGGGSGGGGSGGGGSGGGGSGAPLKIQAYFNETADLPCQFANSQNISLSELVVAWQDQENLVLNEVYLGKEKFDSVHSKYMGRTSFDSDSWTLRLHNLQIKDKGLYQCIIIHKKPTGMIRIHQMNSELSVL

SEQ ID NO: 908 - protein, 660 aa, synthetic construct
  REGION 1..660: note = LAG3 97-156-atezolizumab antibody heavy chain -CD86 IgV-Q25I/H90I
RRYTVLSVGPGGLRSGRLPLQPRVQLDERGRQRGDFSLWLRPARRADAGEYRAAVHLRDRGGGGSGGGGSGGGGSGGGGSGEVQLVESGGGLVQPGGSLRLSCAASGFTFSDSWIHWVRQAPGKGLEWVAWISPYGGSTYYADSVKGRFTISADTSKNTAYLQMNSLRAEDTAVYYCARRHWPGGFDYWGQGTLVTVSSASTKGPSVFPLAPSSKSTSGGTAALGCLVKDYFPEPVTVSWNSGALTSGVHTFPAVLQSSGLYSLSSVVTVPSSSLGTQTYICNVNHKPSNTKVDKKVEPKSCDKTHTCPPCPAPELLGGPSVFLFPPKPKDTLMISRTPEVTCVVVDVSHEDPEVKFNWYVDGVEVHNAKTKPREEQYASTYRVVSVLTVLHQDWLNGKEYKCKVSNKALPAPIEKTISKAKGQPREPQVYTLPPSREEMTKNQVSLTCLVKGFYPSDIAVEWESNGQPENNYKTTPPVLDSDGSFFLYSKLTVDKSRWQQGNVFSCSVMHEALHNHYTQKSLSLSPGAGGGGSGGGGSGGGGSGGGGSGAPLKIQAYFNETADLPCQFANSQNISLSELVVFWQDQENLVLNEVYLGKEKFDSVHSKYMGRTSFDSDSWTLRLHNLQIKDKGLYQCIIIHKKPTGMIRIHQMNSELSVL

SEQ ID NO: 909 - protein, 660 aa, synthetic construct
  REGION 1..660: note = LAG3 97-156-atezolizumab antibody heavy chain -CD86 IgV-Q25V/H90V
RRYTVLSVGPGGLRSGRLPLQPRVQLDERGRQRGDFSLWLRPARRADAGEYRAAVHLRDRGGGGSGGGGSGGGGSGGGGSGEVQLVESGGGLVQPGGSLRLSCAASGFTFSDSWIHWVRQAPGKGLEWVAWISPYGGSTYYADSVKGRFTISADTSKNTAYLQMNSLRAEDTAVYYCARRHWPGGFDYWGQGTLVTVSSASTKGPSVFPLAPSSKSTSGGTAALGCLVKDYFPEPVTVSWNSGALTSGVHTFPAVLQSSGLYSLSSVVTVPSSSLGTQTYICNVNHKPSNTKVDKKVEPKSCDKTHTCPPCPAPELLGGPSVFLFPPKPKDTLMISRTPEVTCVVVDVSHEDPEVKFNWYVDGVEVHNAKTKPREEQYASTYRVVSVLTVLHQDWLNGKEYKCKVSNKALPAPIEKTISKAKGQPREPQVYTLPPSREEMTKNQVSLTCLVKGFYPSDIAVEWESNGQPENNYKTTPPVLDSDGSFFLYSKLTVDKSRWQQGNVFSCSVMHEALHNHYTQKSLSLSPGAGGGGSGGGGSGGGGSGGGGSGAPLKIQAYFNETADLPCQFANSQNVSLSELVVFWQDQENLVLNEVYLGKEKFDSVHSKYMGRTSFDSDSWTLRLHNLQIKDKGLYQCIIVHKKPTGMIRIHQMNSELSVL

SEQ ID NO: 910 - protein, 660 aa, synthetic construct
  REGION 1..660: note = LAG3 97-156-atezolizumab antibody heavy chain -CD86 IgV-Q25V/H90I
RRYTVLSVGPGGLRSGRLPLQPRVQLDERGRQRGDFSLWLRPARRADAGEYRAAVHLRDRGGGGSGGGGSGGGGSGGGGSGEVQLVESGGGLVQPGGSLRLSCAASGFTFSDSWIHWVRQAPGKGLEWVAWISPYGGSTYYADSVKGRFTISADTSKNTAYLQMNSLRAEDTAVYYCARRHWPGGFDYWGQGTLVTVSSASTKGPSVFPLAPSSKSTSGGTAALGCLVKDYFPEPVTVSWNSGALTSGVHTFPAVLQSSGLYSLSSVVTVPSSSLGTQTYICNVNHKPSNTKVDKKVEPKSCDKTHTCPPCPAPELLGGPSVFLFPPKPKDTLMISRTPEVTCVVVDVSHEDPEVKFNWYVDGVEVHNAKTKPREEQYASTYRVVSVLTVLHQDWLNGKEYKCKVSNKALPAPIEKTISKAKGQPREPQVYTLPPSREEMTKNQVSLTCLVKGFYPSDIAVEWESNGQPENNYKTTPPVLDSDGSFFLYSKLTVDKSRWQQGNVFSCSVMHEALHNHYTQKSLSLSPGAGGGGSGGGGSGGGGSGGGGSGAPLKIQAYFNETADLPCQFANSQNVSLSELVVFWQDQENLVLNEVYLGKEKFDSVHSKYMGRTSFDSDSWTLRLHNLQIKDKGLYQCIIIHKKPTGMIRIHQMNSELSVL

SEQ ID NO: 911 - protein, 660 aa, synthetic construct
  REGION 1..660: note = LAG3 97-156-atezolizumab antibody heavy chain -CD86 IgV-Q25F/H90I
RRYTVLSVGPGGLRSGRLPLQPRVQLDERGRQRGDFSLWLRPARRADAGEYRAAVHLRDRGGGGSGGGGSGGGGSGGGGSGEVQLVESGGGLVQPGGSLRLSCAASGFTFSDSWIHWVRQAPGKGLEWVAWISPYGGSTYYADSVKGRFTISADTSKNTAYLQMNSLRAEDTAVYYCARRHWPGGFDYWGQGTLVTVSSASTKGPSVFPLAPSSKSTSGGTAALGCLVKDYFPEPVTVSWNSGALTSGVHTFPAVLQSSGLYSLSSVVTVPSSSLGTQTYICNVNHKPSNTKVDKKVEPKSCDKTHTCPPCPAPELLGGPSVFLFPPKPKDTLMISRTPEVTCVVVDVSHEDPEVKFNWYVDGVEVHNAKTKPREEQYASTYRVVSVLTVLHQDWLNGKEYKCKVSNKALPAPIEKTISKAKGQPREPQVYTLPPSREEMTKNQVSLTCLVKGFYPSDIAVEWESNGQPENNYKTTPPVLDSDGSFFLYSKLTVDKSRWQQGNVFSCSVMHEALHNHYTQKSLSLSPGAGGGGSGGGGSGGGGSGGGGSGAPLKIQAYFNETADLPCQFANSQNFSLSELVVFWQDQENLVLNEVYLGKEKFDSVHSKYMGRTSFDSDSWTLRLHNLQIKDKGLYQCIIIHKKPTGMIRIHQMNSELSVL

SEQ ID NO: 912 - protein, 660 aa, synthetic construct
  REGION 1..660: note = LAG3 97-156-atezolizumab antibody heavy chain -CD86 IgV-Q25F/H90V
RRYTVLSVGPGGLRSGRLPLQPRVQLDERGRQRGDFSLWLRPARRADAGEYRAAVHLRDRGGGGSGGGGSGGGGSGGGGSGEVQLVESGGGLVQPGGSLRLSCAASGFTFSDSWIHWVRQAPGKGLEWVAWISPYGGSTYYADSVKGRFTISADTSKNTAYLQMNSLRAEDTAVYYCARRHWPGGFDYWGQGTLVTVSSASTKGPSVFPLAPSSKSTSGGTAALGCLVKDYFPEPVTVSWNSGALTSGVHTFPAVLQSSGLYSLSSVVTVPSSSLGTQTYICNVNHKPSNTKVDKKVEPKSCDKTHTCPPCPAPELLGGPSVFLFPPKPKDTLMISRTPEVTCVVVDVSHEDPEVKFNWYVDGVEVHNAKTKPREEQYASTYRVVSVLTVLHQDWLNGKEYKCKVSNKALPAPIEKTISKAKGQPREPQVYTLPPSREEMTKNQVSLTCLVKGFYPSDIAVEWESNGQPENNYKTTPPVLDSDGSFFLYSKLTVDKSRWQQGNVFSCSVMHEALHNHYTQKSLSLSPGAGGGGSGGGGSGGGGSGGGGSGAPLKIQAYFNETADLPCQFANSQNFSLSELVVFWQDQENLVLNEVYLGKEKFDSVHSKYMGRTSFDSDSWTLRLHNLQIKDKGLYQCIIVHKKPTGMIRIHQMNSELSVL

SEQ ID NO: 913 - protein, 660 aa, synthetic construct
  REGION 1..660: note = LAG3 97-156-atezolizumab antibody heavy chain -CD86 IgV-A13F/Q25I/F33L/H90I
RRYTVLSVGPGGLRSGRLPLQPRVQLDERGRQRGDFSLWLRPARRADAGEYRAAVHLRDRGGGGSGGGGSGGGGSGGGGSGEVQLVESGGGLVQPGGSLRLSCAASGFTFSDSWIHWVRQAPGKGLEWVAWISPYGGSTYYADSVKGRFTISADTSKNTAYLQMNSLRAEDTAVYYCARRHWPGGFDYWGQGTLVTVSSASTKGPSVFPLAPSSKSTSGGTAALGCLVKDYFPEPVTVSWNSGALTSGVHTFPAVLQSSGLYSLSSVVTVPSSSLGTQTYICNVNHKPSNTKVDKKVEPKSCDKTHTCPPCPAPELLGGPSVFLFPPKPKDTLMISRTPEVTCVVVDVSHEDPEVKFNWYVDGVEVHNAKTKPREEQYASTYRVVSVLTVLHQDWLNGKEYKCKVSNKALPAPIEKTISKAKGQPREPQVYTLPPSREEMTKNQVSLTCLVKGFYPSDIAVEWESNGQPENNYKTTPPVLDSDGSFFLYSKLTVDKSRWQQGNVFSCSVMHEALHNHYTQKSLSLSPGAGGGGSGGGGSGGGGSGGGGSGAPLKIQAYFNETFDLPCQFANSQNISLSELVVLWQDQENLVLNEVYLGKEKFDSVHSKYMGRTSFDSDSWTLRLHNLQIKDKGLYQCIIIHKKPTGMIRIHQMNSELSVL

SEQ ID NO: 914 - protein, 660 aa, synthetic construct
  REGION 1..660: note = LAG3 97-156-atezolizumab antibody heavy chain -CD86 IgV-A13M/Q25I/F33L/H90I
RRYTVLSVGPGGLRSGRLPLQPRVQLDERGRQRGDFSLWLRPARRADAGEYRAAVHLRDRGGGGSGGGGSGGGGSGGGGSGEVQLVESGGGLVQPGGSLRLSCAASGFTFSDSWIHWVRQAPGKGLEWVAWISPYGGSTYYADSVKGRFTISADTSKNTAYLQMNSLRAEDTAVYYCARRHWPGGFDYWGQGTLVTVSSASTKGPSVFPLAPSSKSTSGGTAALGCLVKDYFPEPVTVSWNSGALTSGVHTFPAVLQSSGLYSLSSVVTVPSSSLGTQTYICNVNHKPSNTKVDKKVEPKSCDKTHTCPPCPAPELLGGPSVFLFPPKPKDTLMISRTPEVTCVVVDVSHEDPEVKFNWYVDGVEVHNAKTKPREEQYASTYRVVSVLTVLHQDWLNGKEYKCKVSNKALPAPIEKTISKAKGQPREPQVYTLPPSREEMTKNQVSLTCLVKGFYPSDIAVEWESNGQPENNYKTTPPVLDSDGSFFLYSKLTVDKSRWQQGNVFSCSVMHEALHNHYTQKSLSLSPGAGGGGSGGGGSGGGGSGGGGSGAPLKIQAYFNETMDLPCQFANSQNISLSELVVLWQDQENLVLNEVYLGKEKFDSVHSKYMGRTSFDSDSWTLRLHNLQIKDKGLYQCIIIHKKPTGMIRIHQMNSELSVL

SEQ ID NO: 915 - protein, 660 aa, synthetic construct
  REGION 1..660: note = LAG3 97-156-atezolizumab antibody heavy chain -CD86 IgV-Q25A/F33L/H90I
RRYTVLSVGPGGLRSGRLPLQPRVQLDERGRQRGDFSLWLRPARRADAGEYRAAVHLRDRGGGGSGGGGSGGGGSGGGGSGEVQLVESGGGLVQPGGSLRLSCAASGFTFSDSWIHWVRQAPGKGLEWVAWISPYGGSTYYADSVKGRFTISADTSKNTAYLQMNSLRAEDTAVYYCARRHWPGGFDYWGQGTLVTVSSASTKGPSVFPLAPSSKSTSGGTAALGCLVKDYFPEPVTVSWNSGALTSGVHTFPAVLQSSGLYSLSSVVTVPSSSLGTQTYICNVNHKPSNTKVDKKVEPKSCDKTHTCPPCPAPELLGGPSVFLFPPKPKDTLMISRTPEVTCVVVDVSHEDPEVKFNWYVDGVEVHNAKTKPREEQYASTYRVVSVLTVLHQDWLNGKEYKCKVSNKALPAPIEKTISKAKGQPREPQVYTLPPSREEMTKNQVSLTCLVKGFYPSDIAVEWESNGQPENNYKTTPPVLDSDGSFFLYSKLTVDKSRWQQGNVFSCSVMHEALHNHYTQKSLSLSPGAGGGGSGGGGSGGGGSGGGGSGAPLKIQAYFNETADLPCQFANSQNASLSELVVLWQDQENLVLNEVYLGKEKFDSVHSKYMGRTSFDSDSWTLRLHNLQIKDKGLYQCIIIHKKPTGMIRIHQMNSELSVL

SEQ ID NO: 916 - protein, 660 aa, synthetic construct
  REGION 1..660: note = LAG3 97-156-atezolizumab antibody heavy chain -CD86 IgV-Q25M/F33L/H90I
RRYTVLSVGPGGLRSGRLPLQPRVQLDERGRQRGDFSLWLRPARRADAGEYRAAVHLRDRGGGGSGGGGSGGGGSGGGGSGEVQLVESGGGLVQPGGSLRLSCAASGFTFSDSWIHWVRQAPGKGLEWVAWISPYGGSTYYADSVKGRFTISADTSKNTAYLQMNSLRAEDTAVYYCARRHWPGGFDYWGQGTLVTVSSASTKGPSVFPLAPSSKSTSGGTAALGCLVKDYFPEPVTVSWNSGALTSGVHTFPAVLQSSGLYSLSSVVTVPSSSLGTQTYICNVNHKPSNTKVDKKVEPKSCDKTHTCPPCPAPELLGGPSVFLFPPKPKDTLMISRTPEVTCVVVDVSHEDPEVKFNWYVDGVEVHNAKTKPREEQYASTYRVVSVLTVLHQDWLNGKEYKCKVSNKALPAPIEKTISKAKGQPREPQVYTLPPSREEMTKNQVSLTCLVKGFYPSDIAVEWESNGQPENNYKTTPPVLDSDGSFFLYSKLTVDKSRWQQGNVFSCSVMHEALHNHYTQKSLSLSPGAGGGGSGGGGSGGGGSGGGGSGAPLKIQAYFNETADLPCQFANSQNMSLSELVVLWQDQENLVLNEVYLGKEKFDSVHSKYMGRTSFDSDSWTLRLHNLQIKDKGLYQCIIIHKKPTGMIRIHQMNSELSVL

SEQ ID NO: 917 - protein, 660 aa, synthetic construct
  REGION 1..660: note = LAG3 97-156-atezolizumab antibody heavy chain -CD86 IgV-Q25I/F33M/H90I
RRYTVLSVGPGGLRSGRLPLQPRVQLDERGRQRGDFSLWLRPARRADAGEYRAAVHLRDRGGGGSGGGGSGGGGSGGGGSGEVQLVESGGGLVQPGGSLRLSCAASGFTFSDSWIHWVRQAPGKGLEWVAWISPYGGSTYYADSVKGRFTISADTSKNTAYLQMNSLRAEDTAVYYCARRHWPGGFDYWGQGTLVTVSSASTKGPSVFPLAPSSKSTSGGTAALGCLVKDYFPEPVTVSWNSGALTSGVHTFPAVLQSSGLYSLSSVVTVPSSSLGTQTYICNVNHKPSNTKVDKKVEPKSCDKTHTCPPCPAPELLGGPSVFLFPPKPKDTLMISRTPEVTCVVVDVSHEDPEVKFNWYVDGVEVHNAKTKPREEQYASTYRVVSVLTVLHQDWLNGKEYKCKVSNKALPAPIEKTISKAKGQPREPQVYTLPPSREEMTKNQVSLTCLVKGFYPSDIAVEWESNGQPENNYKTTPPVLDSDGSFFLYSKLTVDKSRWQQGNVFSCSVMHEALHNHYTQKSLSLSPGAGGGGSGGGGSGGGGSGGGGSGAPLKIQAYFNETADLPCQFANSQNISLSELVVMWQDQENLVLNEVYLGKEKFDSVHSKYMGRTSFDSDSWTLRLHNLQIKDKGLYQCIIIHKKPTGMIRIHQMNSELSVL

SEQ ID NO: 918 - protein, 660 aa, synthetic construct
  REGION 1..660: note = LAG3 97-156-atezolizumab antibody heavy chain -CD86 IgV-Q25I/F33L/I89V/H90I
RRYTVLSVGPGGLRSGRLPLQPRVQLDERGRQRGDFSLWLRPARRADAGEYRAAVHLRDRGGGGSGGGGSGGGGSGGGGSGEVQLVESGGGLVQPGGSLRLSCAASGFTFSDSWIHWVRQAPGKGLEWVAWISPYGGSTYYADSVKGRFTISADTSKNTAYLQMNSLRAEDTAVYYCARRHWPGGFDYWGQGTLVTVSSASTKGPSVFPLAPSSKSTSGGTAALGCLVKDYFPEPVTVSWNSGALTSGVHTFPAVLQSSGLYSLSSVVTVPSSSLGTQTYICNVNHKPSNTKVDKKVEPKSCDKTHTCPPCPAPELLGGPSVFLFPPKPKDTLMISRTPEVTCVVVDVSHEDPEVKFNWYVDGVEVHNAKTKPREEQYASTYRVVSVLTVLHQDWLNGKEYKCKVSNKALPAPIEKTISKAKGQPREPQVYTLPPSREEMTKNQVSLTCLVKGFYPSDIAVEWESNGQPENNYKTTPPVLDSDGSFFLYSKLTVDKSRWQQGNVFSCSVMHEALHNHYTQKSLSLSPGAGGGGSGGGGSGGGGSGGGGSGAPLKIQAYFNETADLPCQFANSQNISLSELVVLWQDQENLVLNEVYLGKEKFDSVHSKYMGRTSFDSDSWTLRLHNLQIKDKGLYQCIVIHKKPTGMIRIHQMNSELSVL

SEQ ID NO: 919 - protein, 660 aa, synthetic construct
  REGION 1..660: note = LAG3 97-156-atezolizumab antibody heavy chain -CD86 IgV-Q25I/F33L/I89F/H90I
RRYTVLSVGPGGLRSGRLPLQPRVQLDERGRQRGDFSLWLRPARRADAGEYRAAVHLRDRGGGGSGGGGSGGGGSGGGGSGEVQLVESGGGLVQPGGSLRLSCAASGFTFSDSWIHWVRQAPGKGLEWVAWISPYGGSTYYADSVKGRFTISADTSKNTAYLQMNSLRAEDTAVYYCARRHWPGGFDYWGQGTLVTVSSASTKGPSVFPLAPSSKSTSGGTAALGCLVKDYFPEPVTVSWNSGALTSGVHTFPAVLQSSGLYSLSSVVTVPSSSLGTQTYICNVNHKPSNTKVDKKVEPKSCDKTHTCPPCPAPELLGGPSVFLFPPKPKDTLMISRTPEVTCVVVDVSHEDPEVKFNWYVDGVEVHNAKTKPREEQYASTYRVVSVLTVLHQDWLNGKEYKCKVSNKALPAPIEKTISKAKGQPREPQVYTLPPSREEMTKNQVSLTCLVKGFYPSDIAVEWESNGQPENNYKTTPPVLDSDGSFFLYSKLTVDKSRWQQGNVFSCSVMHEALHNHYTQKSLSLSPGAGGGGSGGGGSGGGGSGGGGSGAPLKIQAYFNETADLPCQFANSQNISLSELVVLWQDQENLVLNEVYLGKEKFDSVHSKYMGRTSFDSDSWTLRLHNLQIKDKGLYQCIFIHKKPTGMIRIHQMNSELSVL

SEQ ID NO: 920 - protein, 660 aa, synthetic construct
  REGION 1..660: note = LAG3 97-156-atezolizumab antibody heavy chain -CD86 IgV-Q25I/F33L/I89M/H90I
RRYTVLSVGPGGLRSGRLPLQPRVQLDERGRQRGDFSLWLRPARRADAGEYRAAVHLRDRGGGGSGGGGSGGGGSGGGGSGEVQLVESGGGLVQPGGSLRLSCAASGFTFSDSWIHWVRQAPGKGLEWVAWISPYGGSTYYADSVKGRFTISADTSKNTAYLQMNSLRAEDTAVYYCARRHWPGGFDYWGQGTLVTVSSASTKGPSVFPLAPSSKSTSGGTAALGCLVKDYFPEPVTVSWNSGALTSGVHTFPAVLQSSGLYSLSSVVTVPSSSLGTQTYICNVNHKPSNTKVDKKVEPKSCDKTHTCPPCPAPELLGGPSVFLFPPKPKDTLMISRTPEVTCVVVDVSHEDPEVKFNWYVDGVEVHNAKTKPREEQYASTYRVVSVLTVLHQDWLNGKEYKCKVSNKALPAPIEKTISKAKGQPREPQVYTLPPSREEMTKNQVSLTCLVKGFYPSDIAVEWESNGQPENNYKTTPPVLDSDGSFFLYSKLTVDKSRWQQGNVFSCSVMHEALHNHYTQKSLSLSPGAGGGGSGGGGSGGGGSGGGGSGAPLKIQAYFNETADLPCQFANSQNISLSELVVLWQDQENLVLNEVYLGKEKFDSVHSKYMGRTSFDSDSWTLRLHNLQIKDKGLYQCIMIHKKPTGMIRIHQMNSELSVL

SEQ ID NO: 921 - protein, 660 aa, synthetic construct
  REGION 1..660: note = LAG3 97-156-atezolizumab antibody heavy chain -CD86 IgV-Q25I/F33L/H90M
RRYTVLSVGPGGLRSGRLPLQPRVQLDERGRQRGDFSLWLRPARRADAGEYRAAVHLRDRGGGGSGGGGSGGGGSGGGGSGEVQLVESGGGLVQPGGSLRLSCAASGFTFSDSWIHWVRQAPGKGLEWVAWISPYGGSTYYADSVKGRFTISADTSKNTAYLQMNSLRAEDTAVYYCARRHWPGGFDYWGQGTLVTVSSASTKGPSVFPLAPSSKSTSGGTAALGCLVKDYFPEPVTVSWNSGALTSGVHTFPAVLQSSGLYSLSSVVTVPSSSLGTQTYICNVNHKPSNTKVDKKVEPKSCDKTHTCPPCPAPELLGGPSVFLFPPKPKDTLMISRTPEVTCVVVDVSHEDPEVKFNWYVDGVEVHNAKTKPREEQYASTYRVVSVLTVLHQDWLNGKEYKCKVSNKALPAPIEKTISKAKGQPREPQVYTLPPSREEMTKNQVSLTCLVKGFYPSDIAVEWESNGQPENNYKTTPPVLDSDGSFFLYSKLTVDKSRWQQGNVFSCSVMHEALHNHYTQKSLSLSPGAGGGGSGGGGSGGGGSGGGGSGAPLKIQAYFNETADLPCQFANSQNISLSELVVLWQDQENLVLNEVYLGKEKFDSVHSKYMGRTSFDSDSWTLRLHNLQIKDKGLYQCIIMHKKPTGMIRIHQMNSELSVL

SEQ ID NO: 922 - protein, 660 aa, synthetic construct
  REGION 1..660: note = LAG3 97-156-atezolizumab antibody heavy chain -CD86 IgV
RRYTVLSVGPGGLRSGRLPLQPRVQLDERGRQRGDFSLWLRPARRADAGEYRAAVHLRDRGGGGSGGGGSGGGGSGGGGSGEVQLVESGGGLVQPGGSLRLSCAASGFTFSDSWIHWVRQAPGKGLEWVAWISPYGGSTYYADSVKGRFTISADTSKNTAYLQMNSLRAEDTAVYYCARRHWPGGFDYWGQGTLVTVSSASTKGPSVFPLAPSSKSTSGGTAALGCLVKDYFPEPVTVSWNSGALTSGVHTFPAVLQSSGLYSLSSVVTVPSSSLGTQTYICNVNHKPSNTKVDKKVEPKSCDKTHTCPPCPAPELLGGPSVFLFPPKPKDTLMISRTPEVTCVVVDVSHEDPEVKFNWYVDGVEVHNAKTKPREEQYASTYRVVSVLTVLHQDWLNGKEYKCKVSNKALPAPIEKTISKAKGQPREPQVYTLPPSREEMTKNQVSLTCLVKGFYPSDIAVEWESNGQPENNYKTTPPVLDSDGSFFLYSKLTVDKSRWQQGNVFSCSVMHEALHNHYTQKSLSLSPGAGGGGSGGGGSGGGGSGGGGSGAPLKIQAYFNETADLPCQFANSQNQSLSELVVFWQDQENLVLNEVYLGKEKFDSVHSKYMGRTSFDSDSWTLRLHNLQIKDKGLYQCIIHHKKPTGMIRIHQMNSELSVL

SEQ ID NO: 923 - protein, 660 aa, synthetic construct
  REGION 1..660: note = LAG3 R97E 97-156-atezolizumab antibody heavy chain -CD86 IgV-Q25I/F33L/H90I
ERYTVLSVGPGGLRSGRLPLQPRVQLDERGRQRGDFSLWLRPARRADAGEYRAAVHLRDRGGGGSGGGGSGGGGSGGGGSGEVQLVESGGGLVQPGGSLRLSCAASGFTFSDSWIHWVRQAPGKGLEWVAWISPYGGSTYYADSVKGRFTISADTSKNTAYLQMNSLRAEDTAVYYCARRHWPGGFDYWGQGTLVTVSSASTKGPSVFPLAPSSKSTSGGTAALGCLVKDYFPEPVTVSWNSGALTSGVHTFPAVLQSSGLYSLSSVVTVPSSSLGTQTYICNVNHKPSNTKVDKKVEPKSCDKTHTCPPCPAPELLGGPSVFLFPPKPKDTLMISRTPEVTCVVVDVSHEDPEVKFNWYVDGVEVHNAKTKPREEQYASTYRVVSVLTVLHQDWLNGKEYKCKVSNKALPAPIEKTISKAKGQPREPQVYTLPPSREEMTKNQVSLTCLVKGFYPSDIAVEWESNGQPENNYKTTPPVLDSDGSFFLYSKLTVDKSRWQQGNVFSCSVMHEALHNHYTQKSLSLSPGAGGGGSGGGGSGGGGSGGGGSGAPLKIQAYFNETADLPCQFANSQNISLSELVVLWQDQENLVLNEVYLGKEKFDSVHSKYMGRTSFDSDSWTLRLHNLQIKDKGLYQCIIIHKKPTGMIRIHQMNSELSVL

SEQ ID NO: 924 - protein, 660 aa, synthetic construct
  REGION 1..660: note = LAG3 R97E 97-156-atezolizumab antibody heavy chain -CD86-ECD-Q25V/F33L/H90I
ERYTVLSVGPGGLRSGRLPLQPRVQLDERGRQRGDFSLWLRPARRADAGEYRAAVHLRDRGGGGSGGGGSGGGGSGGGGSGEVQLVESGGGLVQPGGSLRLSCAASGFTFSDSWIHWVRQAPGKGLEWVAWISPYGGSTYYADSVKGRFTISADTSKNTAYLQMNSLRAEDTAVYYCARRHWPGGFDYWGQGTLVTVSSASTKGPSVFPLAPSSKSTSGGTAALGCLVKDYFPEPVTVSWNSGALTSGVHTFPAVLQSSGLYSLSSVVTVPSSSLGTQTYICNVNHKPSNTKVDKKVEPKSCDKTHTCPPCPAPELLGGPSVFLFPPKPKDTLMISRTPEVTCVVVDVSHEDPEVKFNWYVDGVEVHNAKTKPREEQYASTYRVVSVLTVLHQDWLNGKEYKCKVSNKALPAPIEKTISKAKGQPREPQVYTLPPSREEMTKNQVSLTCLVKGFYPSDIAVEWESNGQPENNYKTTPPVLDSDGSFFLYSKLTVDKSRWQQGNVFSCSVMHEALHNHYTQKSLSLSPGAGGGGSGGGGSGGGGSGGGGSGAPLKIQAYFNETADLPCQFANSQNVSLSELVVLWQDQENLVLNEVYLGKEKFDSVHSKYMGRTSFDSDSWTLRLHNLQIKDKGLYQCIIIHKKPTGMIRIHQMNSELSVL

SEQ ID NO: 925 - protein, 660 aa, synthetic construct
  REGION 1..660: note = LAG3 R97E 97-156-atezolizumab antibody heavy chain -CD86 IgV-Q25I/F33V/H90I
ERYTVLSVGPGGLRSGRLPLQPRVQLDERGRQRGDFSLWLRPARRADAGEYRAAVHLRDRGGGGSGGGGSGGGGSGGGGSGEVQLVESGGGLVQPGGSLRLSCAASGFTFSDSWIHWVRQAPGKGLEWVAWISPYGGSTYYADSVKGRFTISADTSKNTAYLQMNSLRAEDTAVYYCARRHWPGGFDYWGQGTLVTVSSASTKGPSVFPLAPSSKSTSGGTAALGCLVKDYFPEPVTVSWNSGALTSGVHTFPAVLQSSGLYSLSSVVTVPSSSLGTQTYICNVNHKPSNTKVDKKVEPKSCDKTHTCPPCPAPELLGGPSVFLFPPKPKDTLMISRTPEVTCVVVDVSHEDPEVKFNWYVDGVEVHNAKTKPREEQYASTYRVVSVLTVLHQDWLNGKEYKCKVSNKALPAPIEKTISKAKGQPREPQVYTLPPSREEMTKNQVSLTCLVKGFYPSDIAVEWESNGQPENNYKTTPPVLDSDGSFFLYSKLTVDKSRWQQGNVFSCSVMHEALHNHYTQKSLSLSPGAGGGGSGGGGSGGGGSGGGGSGAPLKIQAYFNETADLPCQFANSQNISLSELVVVWQDQENLVLNEVYLGKEKFDSVHSKYMGRTSFDSDSWTLRLHNLQIKDKGLYQCIIIHKKPTGMIRIHQMNSELSVL

SEQ ID NO: 926 - protein, 660 aa, synthetic construct
  REGION 1..660: note = LAG3 R97E 97-156-atezolizumab antibody heavy chain -CD86 IgV-Q25V/F33V/H90I
ERYTVLSVGPGGLRSGRLPLQPRVQLDERGRQRGDFSLWLRPARRADAGEYRAAVHLRDRGGGGSGGGGSGGGGSGGGGSGEVQLVESGGGLVQPGGSLRLSCAASGFTFSDSWIHWVRQAPGKGLEWVAWISPYGGSTYYADSVKGRFTISADTSKNTAYLQMNSLRAEDTAVYYCARRHWPGGFDYWGQGTLVTVSSASTKGPSVFPLAPSSKSTSGGTAALGCLVKDYFPEPVTVSWNSGALTSGVHTFPAVLQSSGLYSLSSVVTVPSSSLGTQTYICNVNHKPSNTKVDKKVEPKSCDKTHTCPPCPAPELLGGPSVFLFPPKPKDTLMISRTPEVTCVVVDVSHEDPEVKFNWYVDGVEVHNAKTKPREEQYASTYRVVSVLTVLHQDWLNGKEYKCKVSNKALPAPIEKTISKAKGQPREPQVYTLPPSREEMTKNQVSLTCLVKGFYPSDIAVEWESNGQPENNYKTTPPVLDSDGSFFLYSKLTVDKSRWQQGNVFSCSVMHEALHNHYTQKSLSLSPGAGGGGSGGGGSGGGGSGGGGSGAPLKIQAYFNETADLPCQFANSQNVSLSELVVVWQDQENLVLNEVYLGKEKFDSVHSKYMGRTSFDSDSWTLRLHNLQIKDKGLYQCIIIHKKPTGMIRIHQMNSELSVL

SEQ ID NO: 927 - protein, 660 aa, synthetic construct
  REGION 1..660: note = LAG3 R97E 97-156-atezolizumab antibody heavy chain -CD86 IgV-Q25I/F33L/H90V
ERYTVLSVGPGGLRSGRLPLQPRVQLDERGRQRGDFSLWLRPARRADAGEYRAAVHLRDRGGGGSGGGGSGGGGSGGGGSGEVQLVESGGGLVQPGGSLRLSCAASGFTFSDSWIHWVRQAPGKGLEWVAWISPYGGSTYYADSVKGRFTISADTSKNTAYLQMNSLRAEDTAVYYCARRHWPGGFDYWGQGTLVTVSSASTKGPSVFPLAPSSKSTSGGTAALGCLVKDYFPEPVTVSWNSGALTSGVHTFPAVLQSSGLYSLSSVVTVPSSSLGTQTYICNVNHKPSNTKVDKKVEPKSCDKTHTCPPCPAPELLGGPSVFLFPPKPKDTLMISRTPEVTCVVVDVSHEDPEVKFNWYVDGVEVHNAKTKPREEQYASTYRVVSVLTVLHQDWLNGKEYKCKVSNKALPAPIEKTISKAKGQPREPQVYTLPPSREEMTKNQVSLTCLVKGFYPSDIAVEWESNGQPENNYKTTPPVLDSDGSFFLYSKLTVDKSRWQQGNVFSCSVMHEALHNHYTQKSLSLSPGAGGGGSGGGGSGGGGSGGGGSGAPLKIQAYFNETADLPCQFANSQNISLSELVVLWQDQENLVLNEVYLGKEKFDSVHSKYMGRTSFDSDSWTLRLHNLQIKDKGLYQCIIVHKKPTGMIRIHQMNSELSVL

SEQ ID NO: 928 - protein, 660 aa, synthetic construct
  REGION 1..660: note = LAG3 R97E 97-156-atezolizumab antibody heavy chain -CD86 IgV-Q25V/F33L/H90V
ERYTVLSVGPGGLRSGRLPLQPRVQLDERGRQRGDFSLWLRPARRADAGEYRAAVHLRDRGGGGSGGGGSGGGGSGGGGSGEVQLVESGGGLVQPGGSLRLSCAASGFTFSDSWIHWVRQAPGKGLEWVAWISPYGGSTYYADSVKGRFTISADTSKNTAYLQMNSLRAEDTAVYYCARRHWPGGFDYWGQGTLVTVSSASTKGPSVFPLAPSSKSTSGGTAALGCLVKDYFPEPVTVSWNSGALTSGVHTFPAVLQSSGLYSLSSVVTVPSSSLGTQTYICNVNHKPSNTKVDKKVEPKSCDKTHTCPPCPAPELLGGPSVFLFPPKPKDTLMISRTPEVTCVVVDVSHEDPEVKFNWYVDGVEVHNAKTKPREEQYASTYRVVSVLTVLHQDWLNGKEYKCKVSNKALPAPIEKTISKAKGQPREPQVYTLPPSREEMTKNQVSLTCLVKGFYPSDIAVEWESNGQPENNYKTTPPVLDSDGSFFLYSKLTVDKSRWQQGNVFSCSVMHEALHNHYTQKSLSLSPGAGGGGSGGGGSGGGGSGGGGSGAPLKIQAYFNETADLPCQFANSQNVSLSELVVLWQDQENLVLNEVYLGKEKFDSVHSKYMGRTSFDSDSWTLRLHNLQIKDKGLYQCIIVHKKPTGMIRIHQMNSELSVL

SEQ ID NO: 929 - protein, 660 aa, synthetic construct
  REGION 1..660: note = LAG3 R97E 97-156-atezolizumab antibody heavy chain -CD86 IgV-Q25I/F33V/H90V
ERYTVLSVGPGGLRSGRLPLQPRVQLDERGRQRGDFSLWLRPARRADAGEYRAAVHLRDRGGGGSGGGGSGGGGSGGGGSGEVQLVESGGGLVQPGGSLRLSCAASGFTFSDSWIHWVRQAPGKGLEWVAWISPYGGSTYYADSVKGRFTISADTSKNTAYLQMNSLRAEDTAVYYCARRHWPGGFDYWGQGTLVTVSSASTKGPSVFPLAPSSKSTSGGTAALGCLVKDYFPEPVTVSWNSGALTSGVHTFPAVLQSSGLYSLSSVVTVPSSSLGTQTYICNVNHKPSNTKVDKKVEPKSCDKTHTCPPCPAPELLGGPSVFLFPPKPKDTLMISRTPEVTCVVVDVSHEDPEVKFNWYVDGVEVHNAKTKPREEQYASTYRVVSVLTVLHQDWLNGKEYKCKVSNKALPAPIEKTISKAKGQPREPQVYTLPPSREEMTKNQVSLTCLVKGFYPSDIAVEWESNGQPENNYKTTPPVLDSDGSFFLYSKLTVDKSRWQQGNVFSCSVMHEALHNHYTQKSLSLSPGAGGGGSGGGGSGGGGSGGGGSGAPLKIQAYFNETADLPCQFANSQNISLSELVVVWQDQENLVLNEVYLGKEKFDSVHSKYMGRTSFDSDSWTLRLHNLQIKDKGLYQCIIVHKKPTGMIRIHQMNSELSVL

SEQ ID NO: 930 - protein, 660 aa, synthetic construct
  REGION 1..660: note = LAG3 R97E 97-156-atezolizumab antibody heavy chain -CD86 IgV-Q25V/F33V/H90V
ERYTVLSVGPGGLRSGRLPLQPRVQLDERGRQRGDFSLWLRPARRADAGEYRAAVHLRDRGGGGSGGGGSGGGGSGGGGSGEVQLVESGGGLVQPGGSLRLSCAASGFTFSDSWIHWVRQAPGKGLEWVAWISPYGGSTYYADSVKGRFTISADTSKNTAYLQMNSLRAEDTAVYYCARRHWPGGFDYWGQGTLVTVSSASTKGPSVFPLAPSSKSTSGGTAALGCLVKDYFPEPVTVSWNSGALTSGVHTFPAVLQSSGLYSLSSVVTVPSSSLGTQTYICNVNHKPSNTKVDKKVEPKSCDKTHTCPPCPAPELLGGPSVFLFPPKPKDTLMISRTPEVTCVVVDVSHEDPEVKFNWYVDGVEVHNAKTKPREEQYASTYRVVSVLTVLHQDWLNGKEYKCKVSNKALPAPIEKTISKAKGQPREPQVYTLPPSREEMTKNQVSLTCLVKGFYPSDIAVEWESNGQPENNYKTTPPVLDSDGSFFLYSKLTVDKSRWQQGNVFSCSVMHEALHNHYTQKSLSLSPGAGGGGSGGGGSGGGGSGGGGSGAPLKIQAYFNETADLPCQFANSQNVSLSELVVVWQDQENLVLNEVYLGKEKFDSVHSKYMGRTSFDSDSWTLRLHNLQIKDKGLYQCIIVHKKPTGMIRIHQMNSELSVL

SEQ ID NO: 931 - protein, 660 aa, synthetic construct
  REGION 1..660: note = LAG3 R97E 97-156-atezolizumab antibody heavy chain -CD86 IgV-A13L/Q25I/F33L/H90I
ERYTVLSVGPGGLRSGRLPLQPRVQLDERGRQRGDFSLWLRPARRADAGEYRAAVHLRDRGGGGSGGGGSGGGGSGGGGSGEVQLVESGGGLVQPGGSLRLSCAASGFTFSDSWIHWVRQAPGKGLEWVAWISPYGGSTYYADSVKGRFTISADTSKNTAYLQMNSLRAEDTAVYYCARRHWPGGFDYWGQGTLVTVSSASTKGPSVFPLAPSSKSTSGGTAALGCLVKDYFPEPVTVSWNSGALTSGVHTFPAVLQSSGLYSLSSVVTVPSSSLGTQTYICNVNHKPSNTKVDKKVEPKSCDKTHTCPPCPAPELLGGPSVFLFPPKPKDTLMISRTPEVTCVVVDVSHEDPEVKFNWYVDGVEVHNAKTKPREEQYASTYRVVSVLTVLHQDWLNGKEYKCKVSNKALPAPIEKTISKAKGQPREPQVYTLPPSREEMTKNQVSLTCLVKGFYPSDIAVEWESNGQPENNYKTTPPVLDSDGSFFLYSKLTVDKSRWQQGNVFSCSVMHEALHNHYTQKSLSLSPGAGGGGSGGGGSGGGGSGGGGSGAPLKIQAYFNETLDLPCQFANSQNISLSELVVLWQDQENLVLNEVYLGKEKFDSVHSKYMGRTSFDSDSWTLRLHNLQIKDKGLYQCIIIHKKPTGMIRIHQMNSELSVL

SEQ ID NO: 932 - protein, 660 aa, synthetic construct
  REGION 1..660: note = LAG3 R97E 97-156-atezolizumab antibody heavy chain -CD86 IgV-A13I/Q25I/F33L/H90I
ERYTVLSVGPGGLRSGRLPLQPRVQLDERGRQRGDFSLWLRPARRADAGEYRAAVHLRDRGGGGSGGGGSGGGGSGGGGSGEVQLVESGGGLVQPGGSLRLSCAASGFTFSDSWIHWVRQAPGKGLEWVAWISPYGGSTYYADSVKGRFTISADTSKNTAYLQMNSLRAEDTAVYYCARRHWPGGFDYWGQGTLVTVSSASTKGPSVFPLAPSSKSTSGGTAALGCLVKDYFPEPVTVSWNSGALTSGVHTFPAVLQSSGLYSLSSVVTVPSSSLGTQTYICNVNHKPSNTKVDKKVEPKSCDKTHTCPPCPAPELLGGPSVFLFPPKPKDTLMISRTPEVTCVVVDVSHEDPEVKFNWYVDGVEVHNAKTKPREEQYASTYRVVSVLTVLHQDWLNGKEYKCKVSNKALPAPIEKTISKAKGQPREPQVYTLPPSREEMTKNQVSLTCLVKGFYPSDIAVEWESNGQPENNYKTTPPVLDSDGSFFLYSKLTVDKSRWQQGNVFSCSVMHEALHNHYTQKSLSLSPGAGGGGSGGGGSGGGGSGGGGSGAPLKIQAYFNETIDLPCQFANSQNISLSELVVLWQDQENLVLNEVYLGKEKFDSVHSKYMGRTSFDSDSWTLRLHNLQIKDKGLYQCIIIHKKPTGMIRIHQMNSELSVL

SEQ ID NO: 933 - protein, 660 aa, synthetic construct
  REGION 1..660: note = LAG3 R97E 97-156-atezolizumab antibody heavy chain -CD86 IgV-A13L/Q25V/F33L/H90I
ERYTVLSVGPGGLRSGRLPLQPRVQLDERGRQRGDFSLWLRPARRADAGEYRAAVHLRDRGGGGSGGGGSGGGGSGGGGSGEVQLVESGGGLVQPGGSLRLSCAASGFTFSDSWIHWVRQAPGKGLEWVAWISPYGGSTYYADSVKGRFTISADTSKNTAYLQMNSLRAEDTAVYYCARRHWPGGFDYWGQGTLVTVSSASTKGPSVFPLAPSSKSTSGGTAALGCLVKDYFPEPVTVSWNSGALTSGVHTFPAVLQSSGLYSLSSVVTVPSSSLGTQTYICNVNHKPSNTKVDKKVEPKSCDKTHTCPPCPAPELLGGPSVFLFPPKPKDTLMISRTPEVTCVVVDVSHEDPEVKFNWYVDGVEVHNAKTKPREEQYASTYRVVSVLTVLHQDWLNGKEYKCKVSNKALPAPIEKTISKAKGQPREPQVYTLPPSREEMTKNQVSLTCLVKGFYPSDIAVEWESNGQPENNYKTTPPVLDSDGSFFLYSKLTVDKSRWQQGNVFSCSVMHEALHNHYTQKSLSLSPGAGGGGSGGGGSGGGGSGGGGSGAPLKIQAYFNETLDLPCQFANSQNVSLSELVVLWQDQENLVLNEVYLGKEKFDSVHSKYMGRTSFDSDSWTLRLHNLQIKDKGLYQCIIIHKKPTGMIRIHQMNSELSVL

SEQ ID NO: 934 - protein, 660 aa, synthetic construct
  REGION 1..660: note = LAG3 R97E 97-156-atezolizumab antibody heavy chain -CD86 IgV-A13I/Q25V/F33L/H90I
ERYTVLSVGPGGLRSGRLPLQPRVQLDERGRQRGDFSLWLRPARRADAGEYRAAVHLRDRGGGGSGGGGSGGGGSGGGGSGEVQLVESGGGLVQPGGSLRLSCAASGFTFSDSWIHWVRQAPGKGLEWVAWISPYGGSTYYADSVKGRFTISADTSKNTAYLQMNSLRAEDTAVYYCARRHWPGGFDYWGQGTLVTVSSASTKGPSVFPLAPSSKSTSGGTAALGCLVKDYFPEPVTVSWNSGALTSGVHTFPAVLQSSGLYSLSSVVTVPSSSLGTQTYICNVNHKPSNTKVDKKVEPKSCDKTHTCPPCPAPELLGGPSVFLFPPKPKDTLMISRTPEVTCVVVDVSHEDPEVKFNWYVDGVEVHNAKTKPREEQYASTYRVVSVLTVLHQDWLNGKEYKCKVSNKALPAPIEKTISKAKGQPREPQVYTLPPSREEMTKNQVSLTCLVKGFYPSDIAVEWESNGQPENNYKTTPPVLDSDGSFFLYSKLTVDKSRWQQGNVFSCSVMHEALHNHYTQKSLSLSPGAGGGGSGGGGSGGGGSGGGGSGAPLKIQAYFNETIDLPCQFANSQNVSLSELVVLWQDQENLVLNEVYLGKEKFDSVHSKYMGRTSFDSDSWTLRLHNLQIKDKGLYQCIIIHKKPTGMIRIHQMNSELSVL

SEQ ID NO: 935 - protein, 660 aa, synthetic construct
  REGION 1..660: note = LAG3 R97E 97-156-atezolizumab antibody heavy chain -CD86 IgV-Q25I/F33L/I89L/H90I
ERYTVLSVGPGGLRSGRLPLQPRVQLDERGRQRGDFSLWLRPARRADAGEYRAAVHLRDRGGGGSGGGGSGGGGSGGGGSGEVQLVESGGGLVQPGGSLRLSCAASGFTFSDSWIHWVRQAPGKGLEWVAWISPYGGSTYYADSVKGRFTISADTSKNTAYLQMNSLRAEDTAVYYCARRHWPGGFDYWGQGTLVTVSSASTKGPSVFPLAPSSKSTSGGTAALGCLVKDYFPEPVTVSWNSGALTSGVHTFPAVLQSSGLYSLSSVVTVPSSSLGTQTYICNVNHKPSNTKVDKKVEPKSCDKTHTCPPCPAPELLGGPSVFLFPPKPKDTLMISRTPEVTCVVVDVSHEDPEVKFNWYVDGVEVHNAKTKPREEQYASTYRVVSVLTVLHQDWLNGKEYKCKVSNKALPAPIEKTISKAKGQPREPQVYTLPPSREEMTKNQVSLTCLVKGFYPSDIAVEWESNGQPENNYKTTPPVLDSDGSFFLYSKLTVDKSRWQQGNVFSCSVMHEALHNHYTQKSLSLSPGAGGGGSGGGGSGGGGSGGGGSGAPLKIQAYFNETADLPCQFANSQNISLSELVVLWQDQENLVLNEVYLGKEKFDSVHSKYMGRTSFDSDSWTLRLHNLQIKDKGLYQCILIHKKPTGMIRIHQMNSELSVL

SEQ ID NO: 936 - protein, 660 aa, synthetic construct
  REGION 1..660: note = LAG3 R97E 97-156-atezolizumab antibody heavy chain -CD86 IgV-Q25I/F33L/M60R/H90I
ERYTVLSVGPGGLRSGRLPLQPRVQLDERGRQRGDFSLWLRPARRADAGEYRAAVHLRDRGGGGSGGGGSGGGGSGGGGSGEVQLVESGGGLVQPGGSLRLSCAASGFTFSDSWIHWVRQAPGKGLEWVAWISPYGGSTYYADSVKGRFTISADTSKNTAYLQMNSLRAEDTAVYYCARRHWPGGFDYWGQGTLVTVSSASTKGPSVFPLAPSSKSTSGGTAALGCLVKDYFPEPVTVSWNSGALTSGVHTFPAVLQSSGLYSLSSVVTVPSSSLGTQTYICNVNHKPSNTKVDKKVEPKSCDKTHTCPPCPAPELLGGPSVFLFPPKPKDTLMISRTPEVTCVVVDVSHEDPEVKFNWYVDGVEVHNAKTKPREEQYASTYRVVSVLTVLHQDWLNGKEYKCKVSNKALPAPIEKTISKAKGQPREPQVYTLPPSREEMTKNQVSLTCLVKGFYPSDIAVEWESNGQPENNYKTTPPVLDSDGSFFLYSKLTVDKSRWQQGNVFSCSVMHEALHNHYTQKSLSLSPGAGGGGSGGGGSGGGGSGGGGSGAPLKIQAYFNETADLPCQFANSQNISLSELVVLWQDQENLVLNEVYLGKEKFDSVHSKYRGRTSFDSDSWTLRLHNLQIKDKGLYQCIIIHKKPTGMIRIHQMNSELSVL

SEQ ID NO: 937 - protein, 660 aa, synthetic construct
  REGION 1..660: note = LAG3 R97E 97-156-atezolizumab antibody heavy chain -CD86 IgV-Q25V/F33L/I89L/H90I
ERYTVLSVGPGGLRSGRLPLQPRVQLDERGRQRGDFSLWLRPARRADAGEYRAAVHLRDRGGGGSGGGGSGGGGSGGGGSGEVQLVESGGGLVQPGGSLRLSCAASGFTFSDSWIHWVRQAPGKGLEWVAWISPYGGSTYYADSVKGRFTISADTSKNTAYLQMNSLRAEDTAVYYCARRHWPGGFDYWGQGTLVTVSSASTKGPSVFPLAPSSKSTSGGTAALGCLVKDYFPEPVTVSWNSGALTSGVHTFPAVLQSSGLYSLSSVVTVPSSSLGTQTYICNVNHKPSNTKVDKKVEPKSCDKTHTCPPCPAPELLGGPSVFLFPPKPKDTLMISRTPEVTCVVVDVSHEDPEVKFNWYVDGVEVHNAKTKPREEQYASTYRVVSVLTVLHQDWLNGKEYKCKVSNKALPAPIEKTISKAKGQPREPQVYTLPPSREEMTKNQVSLTCLVKGFYPSDIAVEWESNGQPENNYKTTPPVLDSDGSFFLYSKLTVDKSRWQQGNVFSCSVMHEALHNHYTQKSLSLSPGAGGGGSGGGGSGGGGSGGGGSGAPLKIQAYFNETADLPCQFANSQNVSLSELVVLWQDQENLVLNEVYLGKEKFDSVHSKYMGRTSFDSDSWTLRLHNLQIKDKGLYQCILIHKKPTGMIRIHQMNSELSVL

SEQ ID NO: 938 - protein, 660 aa, synthetic construct
  REGION 1..660: note = LAG3 R97E 97-156-atezolizumab antibody heavy chain -CD86 IgV-Q25V/F33L/M60R/H90I
ERYTVLSVGPGGLRSGRLPLQPRVQLDERGRQRGDFSLWLRPARRADAGEYRAAVHLRDRGGGGSGGGGSGGGGSGGGGSGEVQLVESGGGLVQPGGSLRLSCAASGFTFSDSWIHWVRQAPGKGLEWVAWISPYGGSTYYADSVKGRFTISADTSKNTAYLQMNSLRAEDTAVYYCARRHWPGGFDYWGQGTLVTVSSASTKGPSVFPLAPSSKSTSGGTAALGCLVKDYFPEPVTVSWNSGALTSGVHTFPAVLQSSGLYSLSSVVTVPSSSLGTQTYICNVNHKPSNTKVDKKVEPKSCDKTHTCPPCPAPELLGGPSVFLFPPKPKDTLMISRTPEVTCVVVDVSHEDPEVKFNWYVDGVEVHNAKTKPREEQYASTYRVVSVLTVLHQDWLNGKEYKCKVSNKALPAPIEKTISKAKGQPREPQVYTLPPSREEMTKNQVSLTCLVKGFYPSDIAVEWESNGQPENNYKTTPPVLDSDGSFFLYSKLTVDKSRWQQGNVFSCSVMHEALHNHYTQKSLSLSPGAGGGGSGGGGSGGGGSGGGGSGAPLKIQAYFNETADLPCQFANSQNVSLSELVVLWQDQENLVLNEVYLGKEKFDSVHSKYRGRTSFDSDSWTLRLHNLQIKDKGLYQCIIIHKKPTGMIRIHQMNSELSVL

SEQ ID NO: 939 - protein, 660 aa, synthetic construct
  REGION 1..660: note = LAG3 R97E 97-156-atezolizumab antibody heavy chain -CD86 IgV-Q25F/F33L/H90I
ERYTVLSVGPGGLRSGRLPLQPRVQLDERGRQRGDFSLWLRPARRADAGEYRAAVHLRDRGGGGSGGGGSGGGGSGGGGSGEVQLVESGGGLVQPGGSLRLSCAASGFTFSDSWIHWVRQAPGKGLEWVAWISPYGGSTYYADSVKGRFTISADTSKNTAYLQMNSLRAEDTAVYYCARRHWPGGFDYWGQGTLVTVSSASTKGPSVFPLAPSSKSTSGGTAALGCLVKDYFPEPVTVSWNSGALTSGVHTFPAVLQSSGLYSLSSVVTVPSSSLGTQTYICNVNHKPSNTKVDKKVEPKSCDKTHTCPPCPAPELLGGPSVFLFPPKPKDTLMISRTPEVTCVVVDVSHEDPEVKFNWYVDGVEVHNAKTKPREEQYASTYRVVSVLTVLHQDWLNGKEYKCKVSNKALPAPIEKTISKAKGQPREPQVYTLPPSREEMTKNQVSLTCLVKGFYPSDIAVEWESNGQPENNYKTTPPVLDSDGSFFLYSKLTVDKSRWQQGNVFSCSVMHEALHNHYTQKSLSLSPGAGGGGSGGGGSGGGGSGGGGSGAPLKIQAYFNETADLPCQFANSQNFSLSELVVLWQDQENLVLNEVYLGKEKFDSVHSKYMGRTSFDSDSWTLRLHNLQIKDKGLYQCIIIHKKPTGMIRIHQMNSELSVL

SEQ ID NO: 940 - protein, 660 aa, synthetic construct
  REGION 1..660: note = LAG3 R97E 97-156-atezolizumab antibody heavy chain -CD86 IgV-Q25I/F33L/H90F
ERYTVLSVGPGGLRSGRLPLQPRVQLDERGRQRGDFSLWLRPARRADAGEYRAAVHLRDRGGGGSGGGGSGGGGSGGGGSGEVQLVESGGGLVQPGGSLRLSCAASGFTFSDSWIHWVRQAPGKGLEWVAWISPYGGSTYYADSVKGRFTISADTSKNTAYLQMNSLRAEDTAVYYCARRHWPGGFDYWGQGTLVTVSSASTKGPSVFPLAPSSKSTSGGTAALGCLVKDYFPEPVTVSWNSGALTSGVHTFPAVLQSSGLYSLSSVVTVPSSSLGTQTYICNVNHKPSNTKVDKKVEPKSCDKTHTCPPCPAPELLGGPSVFLFPPKPKDTLMISRTPEVTCVVVDVSHEDPEVKFNWYVDGVEVHNAKTKPREEQYASTYRVVSVLTVLHQDWLNGKEYKCKVSNKALPAPIEKTISKAKGQPREPQVYTLPPSREEMTKNQVSLTCLVKGFYPSDIAVEWESNGQPENNYKTTPPVLDSDGSFFLYSKLTVDKSRWQQGNVFSCSVMHEALHNHYTQKSLSLSPGAGGGGSGGGGSGGGGSGGGGSGAPLKIQAYFNETADLPCQFANSQNISLSELVVLWQDQENLVLNEVYLGKEKFDSVHSKYMGRTSFDSDSWTLRLHNLQIKDKGLYQCIIFHKKPTGMIRIHQMNSELSVL

SEQ ID NO: 941 - protein, 660 aa, synthetic construct
  REGION 1..660: note = LAG3 R97E 97-156-atezolizumab antibody heavy chain -CD86 IgV-Q25I/F33A/H90I
ERYTVLSVGPGGLRSGRLPLQPRVQLDERGRQRGDFSLWLRPARRADAGEYRAAVHLRDRGGGGSGGGGSGGGGSGGGGSGEVQLVESGGGLVQPGGSLRLSCAASGFTFSDSWIHWVRQAPGKGLEWVAWISPYGGSTYYADSVKGRFTISADTSKNTAYLQMNSLRAEDTAVYYCARRHWPGGFDYWGQGTLVTVSSASTKGPSVFPLAPSSKSTSGGTAALGCLVKDYFPEPVTVSWNSGALTSGVHTFPAVLQSSGLYSLSSVVTVPSSSLGTQTYICNVNHKPSNTKVDKKVEPKSCDKTHTCPPCPAPELLGGPSVFLFPPKPKDTLMISRTPEVTCVVVDVSHEDPEVKFNWYVDGVEVHNAKTKPREEQYASTYRVVSVLTVLHQDWLNGKEYKCKVSNKALPAPIEKTISKAKGQPREPQVYTLPPSREEMTKNQVSLTCLVKGFYPSDIAVEWESNGQPENNYKTTPPVLDSDGSFFLYSKLTVDKSRWQQGNVFSCSVMHEALHNHYTQKSLSLSPGAGGGGSGGGGSGGGGSGGGGSGAPLKIQAYFNETADLPCQFANSQNISLSELVVAWQDQENLVLNEVYLGKEKFDSVHSKYMGRTSFDSDSWTLRLHNLQIKDKGLYQCIIIHKKPTGMIRIHQMNSELSVL

SEQ ID NO: 942 - protein, 660 aa, synthetic construct
  REGION 1..660: note = LAG3 R97E 97-156-atezolizumab antibody heavy chain -CD86 IgV-Q25I/H90I
ERYTVLSVGPGGLRSGRLPLQPRVQLDERGRQRGDFSLWLRPARRADAGEYRAAVHLRDRGGGGSGGGGSGGGGSGGGGSGEVQLVESGGGLVQPGGSLRLSCAASGFTFSDSWIHWVRQAPGKGLEWVAWISPYGGSTYYADSVKGRFTISADTSKNTAYLQMNSLRAEDTAVYYCARRHWPGGFDYWGQGTLVTVSSASTKGPSVFPLAPSSKSTSGGTAALGCLVKDYFPEPVTVSWNSGALTSGVHTFPAVLQSSGLYSLSSVVTVPSSSLGTQTYICNVNHKPSNTKVDKKVEPKSCDKTHTCPPCPAPELLGGPSVFLFPPKPKDTLMISRTPEVTCVVVDVSHEDPEVKFNWYVDGVEVHNAKTKPREEQYASTYRVVSVLTVLHQDWLNGKEYKCKVSNKALPAPIEKTISKAKGQPREPQVYTLPPSREEMTKNQVSLTCLVKGFYPSDIAVEWESNGQPENNYKTTPPVLDSDGSFFLYSKLTVDKSRWQQGNVFSCSVMHEALHNHYTQKSLSLSPGAGGGGSGGGGSGGGGSGGGGSGAPLKIQAYFNETADLPCQFANSQNISLSELVVFWQDQENLVLNEVYLGKEKFDSVHSKYMGRTSFDSDSWTLRLHNLQIKDKGLYQCIIIHKKPTGMIRIHQMNSELSVL

SEQ ID NO: 943 - protein, 660 aa, synthetic construct
  REGION 1..660: note = LAG3 R97E 97-156-atezolizumab antibody heavy chain -CD86 IgV-Q25V/H90V
ERYTVLSVGPGGLRSGRLPLQPRVQLDERGRQRGDFSLWLRPARRADAGEYRAAVHLRDRGGGGSGGGGSGGGGSGGGGSGEVQLVESGGGLVQPGGSLRLSCAASGFTFSDSWIHWVRQAPGKGLEWVAWISPYGGSTYYADSVKGRFTISADTSKNTAYLQMNSLRAEDTAVYYCARRHWPGGFDYWGQGTLVTVSSASTKGPSVFPLAPSSKSTSGGTAALGCLVKDYFPEPVTVSWNSGALTSGVHTFPAVLQSSGLYSLSSVVTVPSSSLGTQTYICNVNHKPSNTKVDKKVEPKSCDKTHTCPPCPAPELLGGPSVFLFPPKPKDTLMISRTPEVTCVVVDVSHEDPEVKFNWYVDGVEVHNAKTKPREEQYASTYRVVSVLTVLHQDWLNGKEYKCKVSNKALPAPIEKTISKAKGQPREPQVYTLPPSREEMTKNQVSLTCLVKGFYPSDIAVEWESNGQPENNYKTTPPVLDSDGSFFLYSKLTVDKSRWQQGNVFSCSVMHEALHNHYTQKSLSLSPGAGGGGSGGGGSGGGGSGGGGSGAPLKIQAYFNETADLPCQFANSQNVSLSELVVFWQDQENLVLNEVYLGKEKFDSVHSKYMGRTSFDSDSWTLRLHNLQIKDKGLYQCIIVHKKPTGMIRIHQMNSELSVL

SEQ ID NO: 944 - protein, 660 aa, synthetic construct
  REGION 1..660: note = LAG3 R97E 97-156-atezolizumab antibody heavy chain -CD86 IgV-Q25V/H90I
ERYTVLSVGPGGLRSGRLPLQPRVQLDERGRQRGDFSLWLRPARRADAGEYRAAVHLRDRGGGGSGGGGSGGGGSGGGGSGEVQLVESGGGLVQPGGSLRLSCAASGFTFSDSWIHWVRQAPGKGLEWVAWISPYGGSTYYADSVKGRFTISADTSKNTAYLQMNSLRAEDTAVYYCARRHWPGGFDYWGQGTLVTVSSASTKGPSVFPLAPSSKSTSGGTAALGCLVKDYFPEPVTVSWNSGALTSGVHTFPAVLQSSGLYSLSSVVTVPSSSLGTQTYICNVNHKPSNTKVDKKVEPKSCDKTHTCPPCPAPELLGGPSVFLFPPKPKDTLMISRTPEVTCVVVDVSHEDPEVKFNWYVDGVEVHNAKTKPREEQYASTYRVVSVLTVLHQDWLNGKEYKCKVSNKALPAPIEKTISKAKGQPREPQVYTLPPSREEMTKNQVSLTCLVKGFYPSDIAVEWESNGQPENNYKTTPPVLDSDGSFFLYSKLTVDKSRWQQGNVFSCSVMHEALHNHYTQKSLSLSPGAGGGGSGGGGSGGGGSGGGGSGAPLKIQAYFNETADLPCQFANSQNVSLSELVVFWQDQENLVLNEVYLGKEKFDSVHSKYMGRTSFDSDSWTLRLHNLQIKDKGLYQCIIIHKKPTGMIRIHQMNSELSVL

SEQ ID NO: 945 - protein, 660 aa, synthetic construct
  REGION 1..660: note = LAG3 R97E 97-156-atezolizumab antibody heavy chain -CD86 IgV-Q25F/H90I
ERYTVLSVGPGGLRSGRLPLQPRVQLDERGRQRGDFSLWLRPARRADAGEYRAAVHLRDRGGGGSGGGGSGGGGSGGGGSGEVQLVESGGGLVQPGGSLRLSCAASGFTFSDSWIHWVRQAPGKGLEWVAWISPYGGSTYYADSVKGRFTISADTSKNTAYLQMNSLRAEDTAVYYCARRHWPGGFDYWGQGTLVTVSSASTKGPSVFPLAPSSKSTSGGTAALGCLVKDYFPEPVTVSWNSGALTSGVHTFPAVLQSSGLYSLSSVVTVPSSSLGTQTYICNVNHKPSNTKVDKKVEPKSCDKTHTCPPCPAPELLGGPSVFLFPPKPKDTLMISRTPEVTCVVVDVSHEDPEVKFNWYVDGVEVHNAKTKPREEQYASTYRVVSVLTVLHQDWLNGKEYKCKVSNKALPAPIEKTISKAKGQPREPQVYTLPPSREEMTKNQVSLTCLVKGFYPSDIAVEWESNGQPENNYKTTPPVLDSDGSFFLYSKLTVDKSRWQQGNVFSCSVMHEALHNHYTQKSLSLSPGAGGGGSGGGGSGGGGSGGGGSGAPLKIQAYFNETADLPCQFANSQNFSLSELVVFWQDQENLVLNEVYLGKEKFDSVHSKYMGRTSFDSDSWTLRLHNLQIKDKGLYQCIIIHKKPTGMIRIHQMNSELSVL

SEQ ID NO: 946 - protein, 660 aa, synthetic construct
  REGION 1..660: note = LAG3 R97E 97-156-atezolizumab antibody heavy chain -CD86 IgV-Q25F/H90V
ERYTVLSVGPGGLRSGRLPLQPRVQLDERGRQRGDFSLWLRPARRADAGEYRAAVHLRDRGGGGSGGGGSGGGGSGGGGSGEVQLVESGGGLVQPGGSLRLSCAASGFTFSDSWIHWVRQAPGKGLEWVAWISPYGGSTYYADSVKGRFTISADTSKNTAYLQMNSLRAEDTAVYYCARRHWPGGFDYWGQGTLVTVSSASTKGPSVFPLAPSSKSTSGGTAALGCLVKDYFPEPVTVSWNSGALTSGVHTFPAVLQSSGLYSLSSVVTVPSSSLGTQTYICNVNHKPSNTKVDKKVEPKSCDKTHTCPPCPAPELLGGPSVFLFPPKPKDTLMISRTPEVTCVVVDVSHEDPEVKFNWYVDGVEVHNAKTKPREEQYASTYRVVSVLTVLHQDWLNGKEYKCKVSNKALPAPIEKTISKAKGQPREPQVYTLPPSREEMTKNQVSLTCLVKGFYPSDIAVEWESNGQPENNYKTTPPVLDSDGSFFLYSKLTVDKSRWQQGNVFSCSVMHEALHNHYTQKSLSLSPGAGGGGSGGGGSGGGGSGGGGSGAPLKIQAYFNETADLPCQFANSQNFSLSELVVFWQDQENLVLNEVYLGKEKFDSVHSKYMGRTSFDSDSWTLRLHNLQIKDKGLYQCIIVHKKPTGMIRIHQMNSELSVL

SEQ ID NO: 947 - protein, 660 aa, synthetic construct
  REGION 1..660: note = LAG3 R97E 97-156-atezolizumab antibody heavy chain -CD86 IgV-A13F/Q25I/F33L/H90I
ERYTVLSVGPGGLRSGRLPLQPRVQLDERGRQRGDFSLWLRPARRADAGEYRAAVHLRDRGGGGSGGGGSGGGGSGGGGSGEVQLVESGGGLVQPGGSLRLSCAASGFTFSDSWIHWVRQAPGKGLEWVAWISPYGGSTYYADSVKGRFTISADTSKNTAYLQMNSLRAEDTAVYYCARRHWPGGFDYWGQGTLVTVSSASTKGPSVFPLAPSSKSTSGGTAALGCLVKDYFPEPVTVSWNSGALTSGVHTFPAVLQSSGLYSLSSVVTVPSSSLGTQTYICNVNHKPSNTKVDKKVEPKSCDKTHTCPPCPAPELLGGPSVFLFPPKPKDTLMISRTPEVTCVVVDVSHEDPEVKFNWYVDGVEVHNAKTKPREEQYASTYRVVSVLTVLHQDWLNGKEYKCKVSNKALPAPIEKTISKAKGQPREPQVYTLPPSREEMTKNQVSLTCLVKGFYPSDIAVEWESNGQPENNYKTTPPVLDSDGSFFLYSKLTVDKSRWQQGNVFSCSVMHEALHNHYTQKSLSLSPGAGGGGSGGGGSGGGGSGGGGSGAPLKIQAYFNETFDLPCQFANSQNISLSELVVLWQDQENLVLNEVYLGKEKFDSVHSKYMGRTSFDSDSWTLRLHNLQIKDKGLYQCIIIHKKPTGMIRIHQMNSELSVL

SEQ ID NO: 948 - protein, 660 aa, synthetic construct
  REGION 1..660: note = LAG3 R97E 97-156-atezolizumab antibody heavy chain -CD86 IgV-A13M/Q25I/F33L/H90I
ERYTVLSVGPGGLRSGRLPLQPRVQLDERGRQRGDFSLWLRPARRADAGEYRAAVHLRDRGGGGSGGGGSGGGGSGGGGSGEVQLVESGGGLVQPGGSLRLSCAASGFTFSDSWIHWVRQAPGKGLEWVAWISPYGGSTYYADSVKGRFTISADTSKNTAYLQMNSLRAEDTAVYYCARRHWPGGFDYWGQGTLVTVSSASTKGPSVFPLAPSSKSTSGGTAALGCLVKDYFPEPVTVSWNSGALTSGVHTFPAVLQSSGLYSLSSVVTVPSSSLGTQTYICNVNHKPSNTKVDKKVEPKSCDKTHTCPPCPAPELLGGPSVFLFPPKPKDTLMISRTPEVTCVVVDVSHEDPEVKFNWYVDGVEVHNAKTKPREEQYASTYRVVSVLTVLHQDWLNGKEYKCKVSNKALPAPIEKTISKAKGQPREPQVYTLPPSREEMTKNQVSLTCLVKGFYPSDIAVEWESNGQPENNYKTTPPVLDSDGSFFLYSKLTVDKSRWQQGNVFSCSVMHEALHNHYTQKSLSLSPGAGGGGSGGGGSGGGGSGGGGSGAPLKIQAYFNETMDLPCQFANSQNISLSELVVLWQDQENLVLNEVYLGKEKFDSVHSKYMGRTSFDSDSWTLRLHNLQIKDKGLYQCIIIHKKPTGMIRIHQMNSELSVL

SEQ ID NO: 949 - protein, 660 aa, synthetic construct
  REGION 1..660: note = LAG3 R97E 97-156-atezolizumab antibody heavy chain -CD86 IgV-Q25A/F33L/H90I
ERYTVLSVGPGGLRSGRLPLQPRVQLDERGRQRGDFSLWLRPARRADAGEYRAAVHLRDRGGGGSGGGGSGGGGSGGGGSGEVQLVESGGGLVQPGGSLRLSCAASGFTFSDSWIHWVRQAPGKGLEWVAWISPYGGSTYYADSVKGRFTISADTSKNTAYLQMNSLRAEDTAVYYCARRHWPGGFDYWGQGTLVTVSSASTKGPSVFPLAPSSKSTSGGTAALGCLVKDYFPEPVTVSWNSGALTSGVHTFPAVLQSSGLYSLSSVVTVPSSSLGTQTYICNVNHKPSNTKVDKKVEPKSCDKTHTCPPCPAPELLGGPSVFLFPPKPKDTLMISRTPEVTCVVVDVSHEDPEVKFNWYVDGVEVHNAKTKPREEQYASTYRVVSVLTVLHQDWLNGKEYKCKVSNKALPAPIEKTISKAKGQPREPQVYTLPPSREEMTKNQVSLTCLVKGFYPSDIAVEWESNGQPENNYKTTPPVLDSDGSFFLYSKLTVDKSRWQQGNVFSCSVMHEALHNHYTQKSLSLSPGAGGGGSGGGGSGGGGSGGGGSGAPLKIQAYFNETADLPCQFANSQNASLSELVVLWQDQENLVLNEVYLGKEKFDSVHSKYMGRTSFDSDSWTLRLHNLQIKDKGLYQCIIIHKKPTGMIRIHQMNSELSVL

SEQ ID NO: 950 - protein, 660 aa, synthetic construct
  REGION 1..660: note = LAG3 R97E 97-156-atezolizumab antibody heavy chain -CD86 IgV-Q25M/F33L/H90I
ERYTVLSVGPGGLRSGRLPLQPRVQLDERGRQRGDFSLWLRPARRADAGEYRAAVHLRDRGGGGSGGGGSGGGGSGGGGSGEVQLVESGGGLVQPGGSLRLSCAASGFTFSDSWIHWVRQAPGKGLEWVAWISPYGGSTYYADSVKGRFTISADTSKNTAYLQMNSLRAEDTAVYYCARRHWPGGFDYWGQGTLVTVSSASTKGPSVFPLAPSSKSTSGGTAALGCLVKDYFPEPVTVSWNSGALTSGVHTFPAVLQSSGLYSLSSVVTVPSSSLGTQTYICNVNHKPSNTKVDKKVEPKSCDKTHTCPPCPAPELLGGPSVFLFPPKPKDTLMISRTPEVTCVVVDVSHEDPEVKFNWYVDGVEVHNAKTKPREEQYASTYRVVSVLTVLHQDWLNGKEYKCKVSNKALPAPIEKTISKAKGQPREPQVYTLPPSREEMTKNQVSLTCLVKGFYPSDIAVEWESNGQPENNYKTTPPVLDSDGSFFLYSKLTVDKSRWQQGNVFSCSVMHEALHNHYTQKSLSLSPGAGGGGSGGGGSGGGGSGGGGSGAPLKIQAYFNETADLPCQFANSQNMSLSELVVLWQDQENLVLNEVYLGKEKFDSVHSKYMGRTSFDSDSWTLRLHNLQIKDKGLYQCIIIHKKPTGMIRIHQMNSELSVL

SEQ ID NO: 951 - protein, 660 aa, synthetic construct
  REGION 1..660: note = LAG3 R97E 97-156-atezolizumab antibody heavy chain -CD86 IgV-Q25I/F33M/H90I
ERYTVLSVGPGGLRSGRLPLQPRVQLDERGRQRGDFSLWLRPARRADAGEYRAAVHLRDRGGGGSGGGGSGGGGSGGGGSGEVQLVESGGGLVQPGGSLRLSCAASGFTFSDSWIHWVRQAPGKGLEWVAWISPYGGSTYYADSVKGRFTISADTSKNTAYLQMNSLRAEDTAVYYCARRHWPGGFDYWGQGTLVTVSSASTKGPSVFPLAPSSKSTSGGTAALGCLVKDYFPEPVTVSWNSGALTSGVHTFPAVLQSSGLYSLSSVVTVPSSSLGTQTYICNVNHKPSNTKVDKKVEPKSCDKTHTCPPCPAPELLGGPSVFLFPPKPKDTLMISRTPEVTCVVVDVSHEDPEVKFNWYVDGVEVHNAKTKPREEQYASTYRVVSVLTVLHQDWLNGKEYKCKVSNKALPAPIEKTISKAKGQPREPQVYTLPPSREEMTKNQVSLTCLVKGFYPSDIAVEWESNGQPENNYKTTPPVLDSDGSFFLYSKLTVDKSRWQQGNVFSCSVMHEALHNHYTQKSLSLSPGAGGGGSGGGGSGGGGSGGGGSGAPLKIQAYFNETADLPCQFANSQNISLSELVVMWQDQENLVLNEVYLGKEKFDSVHSKYMGRTSFDSDSWTLRLHNLQIKDKGLYQCIIIHKKPTGMIRIHQMNSELSVL

SEQ ID NO: 952 - protein, 660 aa, synthetic construct
  REGION 1..660: note = LAG3 R97E 97-156-atezolizumab antibody heavy chain -CD86 IgV-Q25I/F33L/I89V/H90I
ERYTVLSVGPGGLRSGRLPLQPRVQLDERGRQRGDFSLWLRPARRADAGEYRAAVHLRDRGGGGSGGGGSGGGGSGGGGSGEVQLVESGGGLVQPGGSLRLSCAASGFTFSDSWIHWVRQAPGKGLEWVAWISPYGGSTYYADSVKGRFTISADTSKNTAYLQMNSLRAEDTAVYYCARRHWPGGFDYWGQGTLVTVSSASTKGPSVFPLAPSSKSTSGGTAALGCLVKDYFPEPVTVSWNSGALTSGVHTFPAVLQSSGLYSLSSVVTVPSSSLGTQTYICNVNHKPSNTKVDKKVEPKSCDKTHTCPPCPAPELLGGPSVFLFPPKPKDTLMISRTPEVTCVVVDVSHEDPEVKFNWYVDGVEVHNAKTKPREEQYASTYRVVSVLTVLHQDWLNGKEYKCKVSNKALPAPIEKTISKAKGQPREPQVYTLPPSREEMTKNQVSLTCLVKGFYPSDIAVEWESNGQPENNYKTTPPVLDSDGSFFLYSKLTVDKSRWQQGNVFSCSVMHEALHNHYTQKSLSLSPGAGGGGSGGGGSGGGGSGGGGSGAPLKIQAYFNETADLPCQFANSQNISLSELVVLWQDQENLVLNEVYLGKEKFDSVHSKYMGRTSFDSDSWTLRLHNLQIKDKGLYQCIVIHKKPTGMIRIHQMNSELSVL

SEQ ID NO: 953 - protein, 660 aa, synthetic construct
  REGION 1..660: note = LAG3 R97E 97-156-atezolizumab antibody heavy chain -CD86 IgV-Q25I/F33L/I89F/H90I
ERYTVLSVGPGGLRSGRLPLQPRVQLDERGRQRGDFSLWLRPARRADAGEYRAAVHLRDRGGGGSGGGGSGGGGSGGGGSGEVQLVESGGGLVQPGGSLRLSCAASGFTFSDSWIHWVRQAPGKGLEWVAWISPYGGSTYYADSVKGRFTISADTSKNTAYLQMNSLRAEDTAVYYCARRHWPGGFDYWGQGTLVTVSSASTKGPSVFPLAPSSKSTSGGTAALGCLVKDYFPEPVTVSWNSGALTSGVHTFPAVLQSSGLYSLSSVVTVPSSSLGTQTYICNVNHKPSNTKVDKKVEPKSCDKTHTCPPCPAPELLGGPSVFLFPPKPKDTLMISRTPEVTCVVVDVSHEDPEVKFNWYVDGVEVHNAKTKPREEQYASTYRVVSVLTVLHQDWLNGKEYKCKVSNKALPAPIEKTISKAKGQPREPQVYTLPPSREEMTKNQVSLTCLVKGFYPSDIAVEWESNGQPENNYKTTPPVLDSDGSFFLYSKLTVDKSRWQQGNVFSCSVMHEALHNHYTQKSLSLSPGAGGGGSGGGGSGGGGSGGGGSGAPLKIQAYFNETADLPCQFANSQNISLSELVVLWQDQENLVLNEVYLGKEKFDSVHSKYMGRTSFDSDSWTLRLHNLQIKDKGLYQCIFIHKKPTGMIRIHQMNSELSVL

SEQ ID NO: 954 - protein, 660 aa, synthetic construct
  REGION 1..660: note = LAG3 R97E 97-156-atezolizumab antibody heavy chain -CD86 IgV-Q25I/F33L/I89M/H90I
ERYTVLSVGPGGLRSGRLPLQPRVQLDERGRQRGDFSLWLRPARRADAGEYRAAVHLRDRGGGGSGGGGSGGGGSGGGGSGEVQLVESGGGLVQPGGSLRLSCAASGFTFSDSWIHWVRQAPGKGLEWVAWISPYGGSTYYADSVKGRFTISADTSKNTAYLQMNSLRAEDTAVYYCARRHWPGGFDYWGQGTLVTVSSASTKGPSVFPLAPSSKSTSGGTAALGCLVKDYFPEPVTVSWNSGALTSGVHTFPAVLQSSGLYSLSSVVTVPSSSLGTQTYICNVNHKPSNTKVDKKVEPKSCDKTHTCPPCPAPELLGGPSVFLFPPKPKDTLMISRTPEVTCVVVDVSHEDPEVKFNWYVDGVEVHNAKTKPREEQYASTYRVVSVLTVLHQDWLNGKEYKCKVSNKALPAPIEKTISKAKGQPREPQVYTLPPSREEMTKNQVSLTCLVKGFYPSDIAVEWESNGQPENNYKTTPPVLDSDGSFFLYSKLTVDKSRWQQGNVFSCSVMHEALHNHYTQKSLSLSPGAGGGGSGGGGSGGGGSGGGGSGAPLKIQAYFNETADLPCQFANSQNISLSELVVLWQDQENLVLNEVYLGKEKFDSVHSKYMGRTSFDSDSWTLRLHNLQIKDKGLYQCIMIHKKPTGMIRIHQMNSELSVL

SEQ ID NO: 955 - protein, 660 aa, synthetic construct
  REGION 1..660: note = LAG3 R97E 97-156-atezolizumab antibody heavy chain -CD86 IgV-Q25I/F33L/H90M
ERYTVLSVGPGGLRSGRLPLQPRVQLDERGRQRGDFSLWLRPARRADAGEYRAAVHLRDRGGGGSGGGGSGGGGSGGGGSGEVQLVESGGGLVQPGGSLRLSCAASGFTFSDSWIHWVRQAPGKGLEWVAWISPYGGSTYYADSVKGRFTISADTSKNTAYLQMNSLRAEDTAVYYCARRHWPGGFDYWGQGTLVTVSSASTKGPSVFPLAPSSKSTSGGTAALGCLVKDYFPEPVTVSWNSGALTSGVHTFPAVLQSSGLYSLSSVVTVPSSSLGTQTYICNVNHKPSNTKVDKKVEPKSCDKTHTCPPCPAPELLGGPSVFLFPPKPKDTLMISRTPEVTCVVVDVSHEDPEVKFNWYVDGVEVHNAKTKPREEQYASTYRVVSVLTVLHQDWLNGKEYKCKVSNKALPAPIEKTISKAKGQPREPQVYTLPPSREEMTKNQVSLTCLVKGFYPSDIAVEWESNGQPENNYKTTPPVLDSDGSFFLYSKLTVDKSRWQQGNVFSCSVMHEALHNHYTQKSLSLSPGAGGGGSGGGGSGGGGSGGGGSGAPLKIQAYFNETADLPCQFANSQNISLSELVVLWQDQENLVLNEVYLGKEKFDSVHSKYMGRTSFDSDSWTLRLHNLQIKDKGLYQCIIMHKKPTGMIRIHQMNSELSVL

SEQ ID NO: 956 - protein, 660 aa, synthetic construct
  REGION 1..660: note = LAG3 R97E 97-156-atezolizumab antibody heavy chain -CD86 IgV
ERYTVLSVGPGGLRSGRLPLQPRVQLDERGRQRGDFSLWLRPARRADAGEYRAAVHLRDRGGGGSGGGGSGGGGSGGGGSGEVQLVESGGGLVQPGGSLRLSCAASGFTFSDSWIHWVRQAPGKGLEWVAWISPYGGSTYYADSVKGRFTISADTSKNTAYLQMNSLRAEDTAVYYCARRHWPGGFDYWGQGTLVTVSSASTKGPSVFPLAPSSKSTSGGTAALGCLVKDYFPEPVTVSWNSGALTSGVHTFPAVLQSSGLYSLSSVVTVPSSSLGTQTYICNVNHKPSNTKVDKKVEPKSCDKTHTCPPCPAPELLGGPSVFLFPPKPKDTLMISRTPEVTCVVVDVSHEDPEVKFNWYVDGVEVHNAKTKPREEQYASTYRVVSVLTVLHQDWLNGKEYKCKVSNKALPAPIEKTISKAKGQPREPQVYTLPPSREEMTKNQVSLTCLVKGFYPSDIAVEWESNGQPENNYKTTPPVLDSDGSFFLYSKLTVDKSRWQQGNVFSCSVMHEALHNHYTQKSLSLSPGAGGGGSGGGGSGGGGSGGGGSGAPLKIQAYFNETADLPCQFANSQNQSLSELVVFWQDQENLVLNEVYLGKEKFDSVHSKYMGRTSFDSDSWTLRLHNLQIKDKGLYQCIIHHKKPTGMIRIHQMNSELSVL

SEQ ID NO: 957 - protein, 645 aa, synthetic construct
  REGION 1..645: note = LAG3 112-156-sugemalimab antibody heavy chain -CD86 IgV-Q25I/F33L/H90I
GRLPLQPRVQLDERGRQRGDFSLWLRPARRADAGEYRAAVHLRDRGGGGSGGGGSGGGGSGGGGSGEVQLLESGGGLVQPGGSLRLSCAASGFTFSSYAMSWVRQAPGKGLEWVSGISGSGGFTYYADSVKGRFTISRDNSKNTLYLQMNSLRAEDTAVYYCAKPPRGYNYGPFDYWGQGTLVTVSSASTKGPSVFPLAPCSRSTSESTAALGCLVKDYFPEPVTVSWNSGALTSGVHTFPAVLQSSGLYSLSSVVTVPSSSLGTKTYTCNVDHKPSNTKVDKRVESKYGPPCPPCPAPEFLGGPSVFLFPPKPKDTLMISRTPEVTCVVVDVSQEDPEVQFNWYVDGVEVHNAKTKPREEQFNSTYRVVSVLTVLHQDWLNGKEYKCKVSNKGLPSSIEKTISKAKGQPREPQVYTLPPSQEEMTKNQVSLTCLVKGFYPSDIAVEWESNGQPENNYKTTPPVLDSDGSFFLYSRLTVDKSRWQEGNVFSCSVMHEALHNHYTQKSLSLSLGAGGGGSGGGGSGGGGSGGGGSGAPLKIQAYFNETADLPCQFANSQNISLSELVVLWQDQENLVLNEVYLGKEKFDSVHSKYMGRTSFDSDSWTLRLHNLQIKDKGLYQCIIIHKKPTGMIRIHQMNSELSVL

SEQ ID NO: 958 - protein, 645 aa, synthetic construct
  REGION 1..645: note = LAG3 112-156-sugemalimab antibody heavy chain -CD86-IgV-Q25V/F33L/H90I
GRLPLQPRVQLDERGRQRGDFSLWLRPARRADAGEYRAAVHLRDRGGGGSGGGGSGGGGSGGGGSGEVQLLESGGGLVQPGGSLRLSCAASGFTFSSYAMSWVRQAPGKGLEWVSGISGSGGFTYYADSVKGRFTISRDNSKNTLYLQMNSLRAEDTAVYYCAKPPRGYNYGPFDYWGQGTLVTVSSASTKGPSVFPLAPCSRSTSESTAALGCLVKDYFPEPVTVSWNSGALTSGVHTFPAVLQSSGLYSLSSVVTVPSSSLGTKTYTCNVDHKPSNTKVDKRVESKYGPPCPPCPAPEFLGGPSVFLFPPKPKDTLMISRTPEVTCVVVDVSQEDPEVQFNWYVDGVEVHNAKTKPREEQFNSTYRVVSVLTVLHQDWLNGKEYKCKVSNKGLPSSIEKTISKAKGQPREPQVYTLPPSQEEMTKNQVSLTCLVKGFYPSDIAVEWESNGQPENNYKTTPPVLDSDGSFFLYSRLTVDKSRWQEGNVFSCSVMHEALHNHYTQKSLSLSLGAGGGGSGGGGSGGGGSGGGGSGAPLKIQAYFNETADLPCQFANSQNVSLSELVVLWQDQENLVLNEVYLGKEKFDSVHSKYMGRTSFDSDSWTLRLHNLQIKDKGLYQCIIIHKKPTGMIRIHQMNSELSVL

SEQ ID NO: 959 - protein, 645 aa, synthetic construct
  REGION 1..645: note = LAG3 112-156-sugemalimab antibody heavy chain -CD86 IgV-Q25I/F33V/H90I
GRLPLQPRVQLDERGRQRGDFSLWLRPARRADAGEYRAAVHLRDRGGGGSGGGGSGGGGSGGGGSGEVQLLESGGGLVQPGGSLRLSCAASGFTFSSYAMSWVRQAPGKGLEWVSGISGSGGFTYYADSVKGRFTISRDNSKNTLYLQMNSLRAEDTAVYYCAKPPRGYNYGPFDYWGQGTLVTVSSASTKGPSVFPLAPCSRSTSESTAALGCLVKDYFPEPVTVSWNSGALTSGVHTFPAVLQSSGLYSLSSVVTVPSSSLGTKTYTCNVDHKPSNTKVDKRVESKYGPPCPPCPAPEFLGGPSVFLFPPKPKDTLMISRTPEVTCVVVDVSQEDPEVQFNWYVDGVEVHNAKTKPREEQFNSTYRVVSVLTVLHQDWLNGKEYKCKVSNKGLPSSIEKTISKAKGQPREPQVYTLPPSQEEMTKNQVSLTCLVKGFYPSDIAVEWESNGQPENNYKTTPPVLDSDGSFFLYSRLTVDKSRWQEGNVFSCSVMHEALHNHYTQKSLSLSLGAGGGGSGGGGSGGGGSGGGGSGAPLKIQAYFNETADLPCQFANSQNISLSELVVVWQDQENLVLNEVYLGKEKFDSVHSKYMGRTSFDSDSWTLRLHNLQIKDKGLYQCIIIHKKPTGMIRIHQMNSELSVL

SEQ ID NO: 960 - protein, 645 aa, synthetic construct
  REGION 1..645: note = LAG3 112-156-sugemalimab antibody heavy chain -CD86 IgV-Q25V/F33V/H90I
GRLPLQPRVQLDERGRQRGDFSLWLRPARRADAGEYRAAVHLRDRGGGGSGGGGSGGGGSGGGGSGEVQLLESGGGLVQPGGSLRLSCAASGFTFSSYAMSWVRQAPGKGLEWVSGISGSGGFTYYADSVKGRFTISRDNSKNTLYLQMNSLRAEDTAVYYCAKPPRGYNYGPFDYWGQGTLVTVSSASTKGPSVFPLAPCSRSTSESTAALGCLVKDYFPEPVTVSWNSGALTSGVHTFPAVLQSSGLYSLSSVVTVPSSSLGTKTYTCNVDHKPSNTKVDKRVESKYGPPCPPCPAPEFLGGPSVFLFPPKPKDTLMISRTPEVTCVVVDVSQEDPEVQFNWYVDGVEVHNAKTKPREEQFNSTYRVVSVLTVLHQDWLNGKEYKCKVSNKGLPSSIEKTISKAKGQPREPQVYTLPPSQEEMTKNQVSLTCLVKGFYPSDIAVEWESNGQPENNYKTTPPVLDSDGSFFLYSRLTVDKSRWQEGNVFSCSVMHEALHNHYTQKSLSLSLGAGGGGSGGGGSGGGGSGGGGSGAPLKIQAYFNETADLPCQFANSQNVSLSELVVVWQDQENLVLNEVYLGKEKFDSVHSKYMGRTSFDSDSWTLRLHNLQIKDKGLYQCIIIHKKPTGMIRIHQMNSELSVL

SEQ ID NO: 961 - protein, 645 aa, synthetic construct
  REGION 1..645: note = LAG3 112-156-sugemalimab antibody heavy chain -CD86 IgV-Q25I/F33L/H90V
GRLPLQPRVQLDERGRQRGDFSLWLRPARRADAGEYRAAVHLRDRGGGGSGGGGSGGGGSGGGGSGEVQLLESGGGLVQPGGSLRLSCAASGFTFSSYAMSWVRQAPGKGLEWVSGISGSGGFTYYADSVKGRFTISRDNSKNTLYLQMNSLRAEDTAVYYCAKPPRGYNYGPFDYWGQGTLVTVSSASTKGPSVFPLAPCSRSTSESTAALGCLVKDYFPEPVTVSWNSGALTSGVHTFPAVLQSSGLYSLSSVVTVPSSSLGTKTYTCNVDHKPSNTKVDKRVESKYGPPCPPCPAPEFLGGPSVFLFPPKPKDTLMISRTPEVTCVVVDVSQEDPEVQFNWYVDGVEVHNAKTKPREEQFNSTYRVVSVLTVLHQDWLNGKEYKCKVSNKGLPSSIEKTISKAKGQPREPQVYTLPPSQEEMTKNQVSLTCLVKGFYPSDIAVEWESNGQPENNYKTTPPVLDSDGSFFLYSRLTVDKSRWQEGNVFSCSVMHEALHNHYTQKSLSLSLGAGGGGSGGGGSGGGGSGGGGSGAPLKIQAYFNETADLPCQFANSQNISLSELVVLWQDQENLVLNEVYLGKEKFDSVHSKYMGRTSFDSDSWTLRLHNLQIKDKGLYQCIIVHKKPTGMIRIHQMNSELSVL

SEQ ID NO: 962 - protein, 645 aa, synthetic construct
  REGION 1..645: note = LAG3 112-156-sugemalimab antibody heavy chain -CD86 IgV-Q25V/F33L/H90V
GRLPLQPRVQLDERGRQRGDFSLWLRPARRADAGEYRAAVHLRDRGGGGSGGGGSGGGGSGGGGSGEVQLLESGGGLVQPGGSLRLSCAASGFTFSSYAMSWVRQAPGKGLEWVSGISGSGGFTYYADSVKGRFTISRDNSKNTLYLQMNSLRAEDTAVYYCAKPPRGYNYGPFDYWGQGTLVTVSSASTKGPSVFPLAPCSRSTSESTAALGCLVKDYFPEPVTVSWNSGALTSGVHTFPAVLQSSGLYSLSSVVTVPSSSLGTKTYTCNVDHKPSNTKVDKRVESKYGPPCPPCPAPEFLGGPSVFLFPPKPKDTLMISRTPEVTCVVVDVSQEDPEVQFNWYVDGVEVHNAKTKPREEQFNSTYRVVSVLTVLHQDWLNGKEYKCKVSNKGLPSSIEKTISKAKGQPREPQVYTLPPSQEEMTKNQVSLTCLVKGFYPSDIAVEWESNGQPENNYKTTPPVLDSDGSFFLYSRLTVDKSRWQEGNVFSCSVMHEALHNHYTQKSLSLSLGAGGGGSGGGGSGGGGSGGGGSGAPLKIQAYFNETADLPCQFANSQNVSLSELVVLWQDQENLVLNEVYLGKEKFDSVHSKYMGRTSFDSDSWTLRLHNLQIKDKGLYQCIIVHKKPTGMIRIHQMNSELSVL

SEQ ID NO: 963 - protein, 645 aa, synthetic construct
  REGION 1..645: note = LAG3 112-156-sugemalimab antibody heavy chain -CD86 IgV-Q25I/F33V/H90V
GRLPLQPRVQLDERGRQRGDFSLWLRPARRADAGEYRAAVHLRDRGGGGSGGGGSGGGGSGGGGSGEVQLLESGGGLVQPGGSLRLSCAASGFTFSSYAMSWVRQAPGKGLEWVSGISGSGGFTYYADSVKGRFTISRDNSKNTLYLQMNSLRAEDTAVYYCAKPPRGYNYGPFDYWGQGTLVTVSSASTKGPSVFPLAPCSRSTSESTAALGCLVKDYFPEPVTVSWNSGALTSGVHTFPAVLQSSGLYSLSSVVTVPSSSLGTKTYTCNVDHKPSNTKVDKRVESKYGPPCPPCPAPEFLGGPSVFLFPPKPKDTLMISRTPEVTCVVVDVSQEDPEVQFNWYVDGVEVHNAKTKPREEQFNSTYRVVSVLTVLHQDWLNGKEYKCKVSNKGLPSSIEKTISKAKGQPREPQVYTLPPSQEEMTKNQVSLTCLVKGFYPSDIAVEWESNGQPENNYKTTPPVLDSDGSFFLYSRLTVDKSRWQEGNVFSCSVMHEALHNHYTQKSLSLSLGAGGGGSGGGGSGGGGSGGGGSGAPLKIQAYFNETADLPCQFANSQNISLSELVVVWQDQENLVLNEVYLGKEKFDSVHSKYMGRTSFDSDSWTLRLHNLQIKDKGLYQCIIVHKKPTGMIRIHQMNSELSVL

SEQ ID NO: 964 - protein, 645 aa, synthetic construct
  REGION 1..645: note = LAG3 112-156-sugemalimab antibody heavy chain -CD86 IgV-Q25V/F33V/H90V
GRLPLQPRVQLDERGRQRGDFSLWLRPARRADAGEYRAAVHLRDRGGGGSGGGGSGGGGSGGGGSGEVQLLESGGGLVQPGGSLRLSCAASGFTFSSYAMSWVRQAPGKGLEWVSGISGSGGFTYYADSVKGRFTISRDNSKNTLYLQMNSLRAEDTAVYYCAKPPRGYNYGPFDYWGQGTLVTVSSASTKGPSVFPLAPCSRSTSESTAALGCLVKDYFPEPVTVSWNSGALTSGVHTFPAVLQSSGLYSLSSVVTVPSSSLGTKTYTCNVDHKPSNTKVDKRVESKYGPPCPPCPAPEFLGGPSVFLFPPKPKDTLMISRTPEVTCVVVDVSQEDPEVQFNWYVDGVEVHNAKTKPREEQFNSTYRVVSVLTVLHQDWLNGKEYKCKVSNKGLPSSIEKTISKAKGQPREPQVYTLPPSQEEMTKNQVSLTCLVKGFYPSDIAVEWESNGQPENNYKTTPPVLDSDGSFFLYSRLTVDKSRWQEGNVFSCSVMHEALHNHYTQKSLSLSLGAGGGGSGGGGSGGGGSGGGGSGAPLKIQAYFNETADLPCQFANSQNVSLSELVVVWQDQENLVLNEVYLGKEKFDSVHSKYMGRTSFDSDSWTLRLHNLQIKDKGLYQCIIVHKKPTGMIRIHQMNSELSVL

SEQ ID NO: 965 - protein, 645 aa, synthetic construct
  REGION 1..645: note = LAG3 112-156-sugemalimab antibody heavy chain -CD86 IgV-A13L/Q25I/F33L/H90I
GRLPLQPRVQLDERGRQRGDFSLWLRPARRADAGEYRAAVHLRDRGGGGSGGGGSGGGGSGGGGSGEVQLLESGGGLVQPGGSLRLSCAASGFTFSSYAMSWVRQAPGKGLEWVSGISGSGGFTYYADSVKGRFTISRDNSKNTLYLQMNSLRAEDTAVYYCAKPPRGYNYGPFDYWGQGTLVTVSSASTKGPSVFPLAPCSRSTSESTAALGCLVKDYFPEPVTVSWNSGALTSGVHTFPAVLQSSGLYSLSSVVTVPSSSLGTKTYTCNVDHKPSNTKVDKRVESKYGPPCPPCPAPEFLGGPSVFLFPPKPKDTLMISRTPEVTCVVVDVSQEDPEVQFNWYVDGVEVHNAKTKPREEQFNSTYRVVSVLTVLHQDWLNGKEYKCKVSNKGLPSSIEKTISKAKGQPREPQVYTLPPSQEEMTKNQVSLTCLVKGFYPSDIAVEWESNGQPENNYKTTPPVLDSDGSFFLYSRLTVDKSRWQEGNVFSCSVMHEALHNHYTQKSLSLSLGAGGGGSGGGGSGGGGSGGGGSGAPLKIQAYFNETLDLPCQFANSQNISLSELVVLWQDQENLVLNEVYLGKEKFDSVHSKYMGRTSFDSDSWTLRLHNLQIKDKGLYQCIIIHKKPTGMIRIHQMNSELSVL

SEQ ID NO: 966 - protein, 645 aa, synthetic construct
  REGION 1..645: note = LAG3 112-156-sugemalimab antibody heavy chain -CD86 IgV-A13I/Q25I/F33L/H90I
GRLPLQPRVQLDERGRQRGDFSLWLRPARRADAGEYRAAVHLRDRGGGGSGGGGSGGGGSGGGGSGEVQLLESGGGLVQPGGSLRLSCAASGFTFSSYAMSWVRQAPGKGLEWVSGISGSGGFTYYADSVKGRFTISRDNSKNTLYLQMNSLRAEDTAVYYCAKPPRGYNYGPFDYWGQGTLVTVSSASTKGPSVFPLAPCSRSTSESTAALGCLVKDYFPEPVTVSWNSGALTSGVHTFPAVLQSSGLYSLSSVVTVPSSSLGTKTYTCNVDHKPSNTKVDKRVESKYGPPCPPCPAPEFLGGPSVFLFPPKPKDTLMISRTPEVTCVVVDVSQEDPEVQFNWYVDGVEVHNAKTKPREEQFNSTYRVVSVLTVLHQDWLNGKEYKCKVSNKGLPSSIEKTISKAKGQPREPQVYTLPPSQEEMTKNQVSLTCLVKGFYPSDIAVEWESNGQPENNYKTTPPVLDSDGSFFLYSRLTVDKSRWQEGNVFSCSVMHEALHNHYTQKSLSLSLGAGGGGSGGGGSGGGGSGGGGSGAPLKIQAYFNETIDLPCQFANSQNISLSELVVLWQDQENLVLNEVYLGKEKFDSVHSKYMGRTSFDSDSWTLRLHNLQIKDKGLYQCIIIHKKPTGMIRIHQMNSELSVL

SEQ ID NO: 967 - protein, 645 aa, synthetic construct
  REGION 1..645: note = LAG3 112-156-sugemalimab antibody heavy chain -CD86 IgV-A13L/Q25V/F33L/H90I
GRLPLQPRVQLDERGRQRGDFSLWLRPARRADAGEYRAAVHLRDRGGGGSGGGGSGGGGSGGGGSGEVQLLESGGGLVQPGGSLRLSCAASGFTFSSYAMSWVRQAPGKGLEWVSGISGSGGFTYYADSVKGRFTISRDNSKNTLYLQMNSLRAEDTAVYYCAKPPRGYNYGPFDYWGQGTLVTVSSASTKGPSVFPLAPCSRSTSESTAALGCLVKDYFPEPVTVSWNSGALTSGVHTFPAVLQSSGLYSLSSVVTVPSSSLGTKTYTCNVDHKPSNTKVDKRVESKYGPPCPPCPAPEFLGGPSVFLFPPKPKDTLMISRTPEVTCVVVDVSQEDPEVQFNWYVDGVEVHNAKTKPREEQFNSTYRVVSVLTVLHQDWLNGKEYKCKVSNKGLPSSIEKTISKAKGQPREPQVYTLPPSQEEMTKNQVSLTCLVKGFYPSDIAVEWESNGQPENNYKTTPPVLDSDGSFFLYSRLTVDKSRWQEGNVFSCSVMHEALHNHYTQKSLSLSLGAGGGGSGGGGSGGGGSGGGGSGAPLKIQAYFNETLDLPCQFANSQNVSLSELVVLWQDQENLVLNEVYLGKEKFDSVHSKYMGRTSFDSDSWTLRLHNLQIKDKGLYQCIIIHKKPTGMIRIHQMNSELSVL

SEQ ID NO: 968 - protein, 645 aa, synthetic construct
  REGION 1..645: note = LAG3 112-156-sugemalimab antibody heavy chain -CD86 IgV-A13I/Q25V/F33L/H90I
GRLPLQPRVQLDERGRQRGDFSLWLRPARRADAGEYRAAVHLRDRGGGGSGGGGSGGGGSGGGGSGEVQLLESGGGLVQPGGSLRLSCAASGFTFSSYAMSWVRQAPGKGLEWVSGISGSGGFTYYADSVKGRFTISRDNSKNTLYLQMNSLRAEDTAVYYCAKPPRGYNYGPFDYWGQGTLVTVSSASTKGPSVFPLAPCSRSTSESTAALGCLVKDYFPEPVTVSWNSGALTSGVHTFPAVLQSSGLYSLSSVVTVPSSSLGTKTYTCNVDHKPSNTKVDKRVESKYGPPCPPCPAPEFLGGPSVFLFPPKPKDTLMISRTPEVTCVVVDVSQEDPEVQFNWYVDGVEVHNAKTKPREEQFNSTYRVVSVLTVLHQDWLNGKEYKCKVSNKGLPSSIEKTISKAKGQPREPQVYTLPPSQEEMTKNQVSLTCLVKGFYPSDIAVEWESNGQPENNYKTTPPVLDSDGSFFLYSRLTVDKSRWQEGNVFSCSVMHEALHNHYTQKSLSLSLGAGGGGSGGGGSGGGGSGGGGSGAPLKIQAYFNETIDLPCQFANSQNVSLSELVVLWQDQENLVLNEVYLGKEKFDSVHSKYMGRTSFDSDSWTLRLHNLQIKDKGLYQCIIIHKKPTGMIRIHQMNSELSVL

SEQ ID NO: 969 - protein, 645 aa, synthetic construct
  REGION 1..645: note = LAG3 112-156-sugemalimab antibody heavy chain -CD86 IgV-Q25I/F33L/I89L/H90I
GRLPLQPRVQLDERGRQRGDFSLWLRPARRADAGEYRAAVHLRDRGGGGSGGGGSGGGGSGGGGSGEVQLLESGGGLVQPGGSLRLSCAASGFTFSSYAMSWVRQAPGKGLEWVSGISGSGGFTYYADSVKGRFTISRDNSKNTLYLQMNSLRAEDTAVYYCAKPPRGYNYGPFDYWGQGTLVTVSSASTKGPSVFPLAPCSRSTSESTAALGCLVKDYFPEPVTVSWNSGALTSGVHTFPAVLQSSGLYSLSSVVTVPSSSLGTKTYTCNVDHKPSNTKVDKRVESKYGPPCPPCPAPEFLGGPSVFLFPPKPKDTLMISRTPEVTCVVVDVSQEDPEVQFNWYVDGVEVHNAKTKPREEQFNSTYRVVSVLTVLHQDWLNGKEYKCKVSNKGLPSSIEKTISKAKGQPREPQVYTLPPSQEEMTKNQVSLTCLVKGFYPSDIAVEWESNGQPENNYKTTPPVLDSDGSFFLYSRLTVDKSRWQEGNVFSCSVMHEALHNHYTQKSLSLSLGAGGGGSGGGGSGGGGSGGGGSGAPLKIQAYFNETADLPCQFANSQNISLSELVVLWQDQENLVLNEVYLGKEKFDSVHSKYMGRTSFDSDSWTLRLHNLQIKDKGLYQCILIHKKPTGMIRIHQMNSELSVL

SEQ ID NO: 970 - protein, 645 aa, synthetic construct
  REGION 1..645: note = LAG3 112-156-sugemalimab antibody heavy chain -CD86 IgV-Q25I/F33L/M60R/H90I
GRLPLQPRVQLDERGRQRGDFSLWLRPARRADAGEYRAAVHLRDRGGGGSGGGGSGGGGSGGGGSGEVQLLESGGGLVQPGGSLRLSCAASGFTFSSYAMSWVRQAPGKGLEWVSGISGSGGFTYYADSVKGRFTISRDNSKNTLYLQMNSLRAEDTAVYYCAKPPRGYNYGPFDYWGQGTLVTVSSASTKGPSVFPLAPCSRSTSESTAALGCLVKDYFPEPVTVSWNSGALTSGVHTFPAVLQSSGLYSLSSVVTVPSSSLGTKTYTCNVDHKPSNTKVDKRVESKYGPPCPPCPAPEFLGGPSVFLFPPKPKDTLMISRTPEVTCVVVDVSQEDPEVQFNWYVDGVEVHNAKTKPREEQFNSTYRVVSVLTVLHQDWLNGKEYKCKVSNKGLPSSIEKTISKAKGQPREPQVYTLPPSQEEMTKNQVSLTCLVKGFYPSDIAVEWESNGQPENNYKTTPPVLDSDGSFFLYSRLTVDKSRWQEGNVFSCSVMHEALHNHYTQKSLSLSLGAGGGGSGGGGSGGGGSGGGGSGAPLKIQAYFNETADLPCQFANSQNISLSELVVLWQDQENLVLNEVYLGKEKFDSVHSKYRGRTSFDSDSWTLRLHNLQIKDKGLYQCIIIHKKPTGMIRIHQMNSELSVL

SEQ ID NO: 971 - protein, 645 aa, synthetic construct
  REGION 1..645: note = LAG3 112-156-sugemalimab antibody heavy chain -CD86 IgV-Q25V/F33L/I89L/H90I
GRLPLQPRVQLDERGRQRGDFSLWLRPARRADAGEYRAAVHLRDRGGGGSGGGGSGGGGSGGGGSGEVQLLESGGGLVQPGGSLRLSCAASGFTFSSYAMSWVRQAPGKGLEWVSGISGSGGFTYYADSVKGRFTISRDNSKNTLYLQMNSLRAEDTAVYYCAKPPRGYNYGPFDYWGQGTLVTVSSASTKGPSVFPLAPCSRSTSESTAALGCLVKDYFPEPVTVSWNSGALTSGVHTFPAVLQSSGLYSLSSVVTVPSSSLGTKTYTCNVDHKPSNTKVDKRVESKYGPPCPPCPAPEFLGGPSVFLFPPKPKDTLMISRTPEVTCVVVDVSQEDPEVQFNWYVDGVEVHNAKTKPREEQFNSTYRVVSVLTVLHQDWLNGKEYKCKVSNKGLPSSIEKTISKAKGQPREPQVYTLPPSQEEMTKNQVSLTCLVKGFYPSDIAVEWESNGQPENNYKTTPPVLDSDGSFFLYSRLTVDKSRWQEGNVFSCSVMHEALHNHYTQKSLSLSLGAGGGGSGGGGSGGGGSGGGGSGAPLKIQAYFNETADLPCQFANSQNVSLSELVVLWQDQENLVLNEVYLGKEKFDSVHSKYMGRTSFDSDSWTLRLHNLQIKDKGLYQCILIHKKPTGMIRIHQMNSELSVL

SEQ ID NO: 972 - protein, 645 aa, synthetic construct
  REGION 1..645: note = LAG3 112-156-sugemalimab antibody heavy chain -CD86 IgV-Q25V/F33L/M60R/H90I
GRLPLQPRVQLDERGRQRGDFSLWLRPARRADAGEYRAAVHLRDRGGGGSGGGGSGGGGSGGGGSGEVQLLESGGGLVQPGGSLRLSCAASGFTFSSYAMSWVRQAPGKGLEWVSGISGSGGFTYYADSVKGRFTISRDNSKNTLYLQMNSLRAEDTAVYYCAKPPRGYNYGPFDYWGQGTLVTVSSASTKGPSVFPLAPCSRSTSESTAALGCLVKDYFPEPVTVSWNSGALTSGVHTFPAVLQSSGLYSLSSVVTVPSSSLGTKTYTCNVDHKPSNTKVDKRVESKYGPPCPPCPAPEFLGGPSVFLFPPKPKDTLMISRTPEVTCVVVDVSQEDPEVQFNWYVDGVEVHNAKTKPREEQFNSTYRVVSVLTVLHQDWLNGKEYKCKVSNKGLPSSIEKTISKAKGQPREPQVYTLPPSQEEMTKNQVSLTCLVKGFYPSDIAVEWESNGQPENNYKTTPPVLDSDGSFFLYSRLTVDKSRWQEGNVFSCSVMHEALHNHYTQKSLSLSLGAGGGGSGGGGSGGGGSGGGGSGAPLKIQAYFNETADLPCQFANSQNVSLSELVVLWQDQENLVLNEVYLGKEKFDSVHSKYRGRTSFDSDSWTLRLHNLQIKDKGLYQCIIIHKKPTGMIRIHQMNSELSVL

SEQ ID NO: 973 - protein, 645 aa, synthetic construct
  REGION 1..645: note = LAG3 112-156-sugemalimab antibody heavy chain -CD86 IgV-Q25F/F33L/H90I
GRLPLQPRVQLDERGRQRGDFSLWLRPARRADAGEYRAAVHLRDRGGGGSGGGGSGGGGSGGGGSGEVQLLESGGGLVQPGGSLRLSCAASGFTFSSYAMSWVRQAPGKGLEWVSGISGSGGFTYYADSVKGRFTISRDNSKNTLYLQMNSLRAEDTAVYYCAKPPRGYNYGPFDYWGQGTLVTVSSASTKGPSVFPLAPCSRSTSESTAALGCLVKDYFPEPVTVSWNSGALTSGVHTFPAVLQSSGLYSLSSVVTVPSSSLGTKTYTCNVDHKPSNTKVDKRVESKYGPPCPPCPAPEFLGGPSVFLFPPKPKDTLMISRTPEVTCVVVDVSQEDPEVQFNWYVDGVEVHNAKTKPREEQFNSTYRVVSVLTVLHQDWLNGKEYKCKVSNKGLPSSIEKTISKAKGQPREPQVYTLPPSQEEMTKNQVSLTCLVKGFYPSDIAVEWESNGQPENNYKTTPPVLDSDGSFFLYSRLTVDKSRWQEGNVFSCSVMHEALHNHYTQKSLSLSLGAGGGGSGGGGSGGGGSGGGGSGAPLKIQAYFNETADLPCQFANSQNFSLSELVVLWQDQENLVLNEVYLGKEKFDSVHSKYMGRTSFDSDSWTLRLHNLQIKDKGLYQCIIIHKKPTGMIRIHQMNSELSVL

SEQ ID NO: 974 - protein, 645 aa, synthetic construct
  REGION 1..645: note = LAG3 112-156-sugemalimab antibody heavy chain -CD86 IgV-Q25I/F33L/H90F
GRLPLQPRVQLDERGRQRGDFSLWLRPARRADAGEYRAAVHLRDRGGGGSGGGGSGGGGSGGGGSGEVQLLESGGGLVQPGGSLRLSCAASGFTFSSYAMSWVRQAPGKGLEWVSGISGSGGFTYYADSVKGRFTISRDNSKNTLYLQMNSLRAEDTAVYYCAKPPRGYNYGPFDYWGQGTLVTVSSASTKGPSVFPLAPCSRSTSESTAALGCLVKDYFPEPVTVSWNSGALTSGVHTFPAVLQSSGLYSLSSVVTVPSSSLGTKTYTCNVDHKPSNTKVDKRVESKYGPPCPPCPAPEFLGGPSVFLFPPKPKDTLMISRTPEVTCVVVDVSQEDPEVQFNWYVDGVEVHNAKTKPREEQFNSTYRVVSVLTVLHQDWLNGKEYKCKVSNKGLPSSIEKTISKAKGQPREPQVYTLPPSQEEMTKNQVSLTCLVKGFYPSDIAVEWESNGQPENNYKTTPPVLDSDGSFFLYSRLTVDKSRWQEGNVFSCSVMHEALHNHYTQKSLSLSLGAGGGGSGGGGSGGGGSGGGGSGAPLKIQAYFNETADLPCQFANSQNISLSELVVLWQDQENLVLNEVYLGKEKFDSVHSKYMGRTSFDSDSWTLRLHNLQIKDKGLYQCIIFHKKPTGMIRIHQMNSELSVL

SEQ ID NO: 975 - protein, 645 aa, synthetic construct
  REGION 1..645: note = LAG3 112-156-sugemalimab antibody heavy chain -CD86 IgV-Q25I/F33A/H90I
GRLPLQPRVQLDERGRQRGDFSLWLRPARRADAGEYRAAVHLRDRGGGGSGGGGSGGGGSGGGGSGEVQLLESGGGLVQPGGSLRLSCAASGFTFSSYAMSWVRQAPGKGLEWVSGISGSGGFTYYADSVKGRFTISRDNSKNTLYLQMNSLRAEDTAVYYCAKPPRGYNYGPFDYWGQGTLVTVSSASTKGPSVFPLAPCSRSTSESTAALGCLVKDYFPEPVTVSWNSGALTSGVHTFPAVLQSSGLYSLSSVVTVPSSSLGTKTYTCNVDHKPSNTKVDKRVESKYGPPCPPCPAPEFLGGPSVFLFPPKPKDTLMISRTPEVTCVVVDVSQEDPEVQFNWYVDGVEVHNAKTKPREEQFNSTYRVVSVLTVLHQDWLNGKEYKCKVSNKGLPSSIEKTISKAKGQPREPQVYTLPPSQEEMTKNQVSLTCLVKGFYPSDIAVEWESNGQPENNYKTTPPVLDSDGSFFLYSRLTVDKSRWQEGNVFSCSVMHEALHNHYTQKSLSLSLGAGGGGSGGGGSGGGGSGGGGSGAPLKIQAYFNETADLPCQFANSQNISLSELVVAWQDQENLVLNEVYLGKEKFDSVHSKYMGRTSFDSDSWTLRLHNLQIKDKGLYQCIIIHKKPTGMIRIHQMNSELSVL

SEQ ID NO: 976 - protein, 645 aa, synthetic construct
  REGION 1..645: note = LAG3 112-156-sugemalimab antibody heavy chain -CD86 IgV-Q25I/H90I
GRLPLQPRVQLDERGRQRGDFSLWLRPARRADAGEYRAAVHLRDRGGGGSGGGGSGGGGSGGGGSGEVQLLESGGGLVQPGGSLRLSCAASGFTFSSYAMSWVRQAPGKGLEWVSGISGSGGFTYYADSVKGRFTISRDNSKNTLYLQMNSLRAEDTAVYYCAKPPRGYNYGPFDYWGQGTLVTVSSASTKGPSVFPLAPCSRSTSESTAALGCLVKDYFPEPVTVSWNSGALTSGVHTFPAVLQSSGLYSLSSVVTVPSSSLGTKTYTCNVDHKPSNTKVDKRVESKYGPPCPPCPAPEFLGGPSVFLFPPKPKDTLMISRTPEVTCVVVDVSQEDPEVQFNWYVDGVEVHNAKTKPREEQFNSTYRVVSVLTVLHQDWLNGKEYKCKVSNKGLPSSIEKTISKAKGQPREPQVYTLPPSQEEMTKNQVSLTCLVKGFYPSDIAVEWESNGQPENNYKTTPPVLDSDGSFFLYSRLTVDKSRWQEGNVFSCSVMHEALHNHYTQKSLSLSLGAGGGGSGGGGSGGGGSGGGGSGAPLKIQAYFNETADLPCQFANSQNISLSELVVFWQDQENLVLNEVYLGKEKFDSVHSKYMGRTSFDSDSWTLRLHNLQIKDKGLYQCIIIHKKPTGMIRIHQMNSELSVL

SEQ ID NO: 977 - protein, 645 aa, synthetic construct
  REGION 1..645: note = LAG3 112-156-sugemalimab antibody heavy chain -CD86 IgV-Q25V/H90V
GRLPLQPRVQLDERGRQRGDFSLWLRPARRADAGEYRAAVHLRDRGGGGSGGGGSGGGGSGGGGSGEVQLLESGGGLVQPGGSLRLSCAASGFTFSSYAMSWVRQAPGKGLEWVSGISGSGGFTYYADSVKGRFTISRDNSKNTLYLQMNSLRAEDTAVYYCAKPPRGYNYGPFDYWGQGTLVTVSSASTKGPSVFPLAPCSRSTSESTAALGCLVKDYFPEPVTVSWNSGALTSGVHTFPAVLQSSGLYSLSSVVTVPSSSLGTKTYTCNVDHKPSNTKVDKRVESKYGPPCPPCPAPEFLGGPSVFLFPPKPKDTLMISRTPEVTCVVVDVSQEDPEVQFNWYVDGVEVHNAKTKPREEQFNSTYRVVSVLTVLHQDWLNGKEYKCKVSNKGLPSSIEKTISKAKGQPREPQVYTLPPSQEEMTKNQVSLTCLVKGFYPSDIAVEWESNGQPENNYKTTPPVLDSDGSFFLYSRLTVDKSRWQEGNVFSCSVMHEALHNHYTQKSLSLSLGAGGGGSGGGGSGGGGSGGGGSGAPLKIQAYFNETADLPCQFANSQNVSLSELVVFWQDQENLVLNEVYLGKEKFDSVHSKYMGRTSFDSDSWTLRLHNLQIKDKGLYQCIIVHKKPTGMIRIHQMNSELSVL

SEQ ID NO: 978 - protein, 645 aa, synthetic construct
  REGION 1..645: note = LAG3 112-156-sugemalimab antibody heavy chain -CD86 IgV-Q25V/H90I
GRLPLQPRVQLDERGRQRGDFSLWLRPARRADAGEYRAAVHLRDRGGGGSGGGGSGGGGSGGGGSGEVQLLESGGGLVQPGGSLRLSCAASGFTFSSYAMSWVRQAPGKGLEWVSGISGSGGFTYYADSVKGRFTISRDNSKNTLYLQMNSLRAEDTAVYYCAKPPRGYNYGPFDYWGQGTLVTVSSASTKGPSVFPLAPCSRSTSESTAALGCLVKDYFPEPVTVSWNSGALTSGVHTFPAVLQSSGLYSLSSVVTVPSSSLGTKTYTCNVDHKPSNTKVDKRVESKYGPPCPPCPAPEFLGGPSVFLFPPKPKDTLMISRTPEVTCVVVDVSQEDPEVQFNWYVDGVEVHNAKTKPREEQFNSTYRVVSVLTVLHQDWLNGKEYKCKVSNKGLPSSIEKTISKAKGQPREPQVYTLPPSQEEMTKNQVSLTCLVKGFYPSDIAVEWESNGQPENNYKTTPPVLDSDGSFFLYSRLTVDKSRWQEGNVFSCSVMHEALHNHYTQKSLSLSLGAGGGGSGGGGSGGGGSGGGGSGAPLKIQAYFNETADLPCQFANSQNVSLSELVVFWQDQENLVLNEVYLGKEKFDSVHSKYMGRTSFDSDSWTLRLHNLQIKDKGLYQCIIIHKKPTGMIRIHQMNSELSVL

SEQ ID NO: 979 - protein, 645 aa, synthetic construct
  REGION 1..645: note = LAG3 112-156-sugemalimab antibody heavy chain -CD86 IgV-Q25F/H90I
GRLPLQPRVQLDERGRQRGDFSLWLRPARRADAGEYRAAVHLRDRGGGGSGGGGSGGGGSGGGGSGEVQLLESGGGLVQPGGSLRLSCAASGFTFSSYAMSWVRQAPGKGLEWVSGISGSGGFTYYADSVKGRFTISRDNSKNTLYLQMNSLRAEDTAVYYCAKPPRGYNYGPFDYWGQGTLVTVSSASTKGPSVFPLAPCSRSTSESTAALGCLVKDYFPEPVTVSWNSGALTSGVHTFPAVLQSSGLYSLSSVVTVPSSSLGTKTYTCNVDHKPSNTKVDKRVESKYGPPCPPCPAPEFLGGPSVFLFPPKPKDTLMISRTPEVTCVVVDVSQEDPEVQFNWYVDGVEVHNAKTKPREEQFNSTYRVVSVLTVLHQDWLNGKEYKCKVSNKGLPSSIEKTISKAKGQPREPQVYTLPPSQEEMTKNQVSLTCLVKGFYPSDIAVEWESNGQPENNYKTTPPVLDSDGSFFLYSRLTVDKSRWQEGNVFSCSVMHEALHNHYTQKSLSLSLGAGGGGSGGGGSGGGGSGGGGSGAPLKIQAYFNETADLPCQFANSQNFSLSELVVFWQDQENLVLNEVYLGKEKFDSVHSKYMGRTSFDSDSWTLRLHNLQIKDKGLYQCIIIHKKPTGMIRIHQMNSELSVL

SEQ ID NO: 980 - protein, 645 aa, synthetic construct
  REGION 1..645: note = LAG3 112-156-sugemalimab antibody heavy chain -CD86 IgV-Q25F/H90V
GRLPLQPRVQLDERGRQRGDFSLWLRPARRADAGEYRAAVHLRDRGGGGSGGGGSGGGGSGGGGSGEVQLLESGGGLVQPGGSLRLSCAASGFTFSSYAMSWVRQAPGKGLEWVSGISGSGGFTYYADSVKGRFTISRDNSKNTLYLQMNSLRAEDTAVYYCAKPPRGYNYGPFDYWGQGTLVTVSSASTKGPSVFPLAPCSRSTSESTAALGCLVKDYFPEPVTVSWNSGALTSGVHTFPAVLQSSGLYSLSSVVTVPSSSLGTKTYTCNVDHKPSNTKVDKRVESKYGPPCPPCPAPEFLGGPSVFLFPPKPKDTLMISRTPEVTCVVVDVSQEDPEVQFNWYVDGVEVHNAKTKPREEQFNSTYRVVSVLTVLHQDWLNGKEYKCKVSNKGLPSSIEKTISKAKGQPREPQVYTLPPSQEEMTKNQVSLTCLVKGFYPSDIAVEWESNGQPENNYKTTPPVLDSDGSFFLYSRLTVDKSRWQEGNVFSCSVMHEALHNHYTQKSLSLSLGAGGGGSGGGGSGGGGSGGGGSGAPLKIQAYFNETADLPCQFANSQNFSLSELVVFWQDQENLVLNEVYLGKEKFDSVHSKYMGRTSFDSDSWTLRLHNLQIKDKGLYQCIIVHKKPTGMIRIHQMNSELSVL

SEQ ID NO: 981 - protein, 645 aa, synthetic construct
  REGION 1..645: note = LAG3 112-156-sugemalimab antibody heavy chain -CD86 IgV-A13F/Q25I/F33L/H90I
GRLPLQPRVQLDERGRQRGDFSLWLRPARRADAGEYRAAVHLRDRGGGGSGGGGSGGGGSGGGGSGEVQLLESGGGLVQPGGSLRLSCAASGFTFSSYAMSWVRQAPGKGLEWVSGISGSGGFTYYADSVKGRFTISRDNSKNTLYLQMNSLRAEDTAVYYCAKPPRGYNYGPFDYWGQGTLVTVSSASTKGPSVFPLAPCSRSTSESTAALGCLVKDYFPEPVTVSWNSGALTSGVHTFPAVLQSSGLYSLSSVVTVPSSSLGTKTYTCNVDHKPSNTKVDKRVESKYGPPCPPCPAPEFLGGPSVFLFPPKPKDTLMISRTPEVTCVVVDVSQEDPEVQFNWYVDGVEVHNAKTKPREEQFNSTYRVVSVLTVLHQDWLNGKEYKCKVSNKGLPSSIEKTISKAKGQPREPQVYTLPPSQEEMTKNQVSLTCLVKGFYPSDIAVEWESNGQPENNYKTTPPVLDSDGSFFLYSRLTVDKSRWQEGNVFSCSVMHEALHNHYTQKSLSLSLGAGGGGSGGGGSGGGGSGGGGSGAPLKIQAYFNETFDLPCQFANSQNISLSELVVLWQDQENLVLNEVYLGKEKFDSVHSKYMGRTSFDSDSWTLRLHNLQIKDKGLYQCIIIHKKPTGMIRIHQMNSELSVL

SEQ ID NO: 982 - protein, 645 aa, synthetic construct
  REGION 1..645: note = LAG3 112-156-sugemalimab antibody heavy chain -CD86 IgV-A13M/Q25I/F33L/H90I
GRLPLQPRVQLDERGRQRGDFSLWLRPARRADAGEYRAAVHLRDRGGGGSGGGGSGGGGSGGGGSGEVQLLESGGGLVQPGGSLRLSCAASGFTFSSYAMSWVRQAPGKGLEWVSGISGSGGFTYYADSVKGRFTISRDNSKNTLYLQMNSLRAEDTAVYYCAKPPRGYNYGPFDYWGQGTLVTVSSASTKGPSVFPLAPCSRSTSESTAALGCLVKDYFPEPVTVSWNSGALTSGVHTFPAVLQSSGLYSLSSVVTVPSSSLGTKTYTCNVDHKPSNTKVDKRVESKYGPPCPPCPAPEFLGGPSVFLFPPKPKDTLMISRTPEVTCVVVDVSQEDPEVQFNWYVDGVEVHNAKTKPREEQFNSTYRVVSVLTVLHQDWLNGKEYKCKVSNKGLPSSIEKTISKAKGQPREPQVYTLPPSQEEMTKNQVSLTCLVKGFYPSDIAVEWESNGQPENNYKTTPPVLDSDGSFFLYSRLTVDKSRWQEGNVFSCSVMHEALHNHYTQKSLSLSLGAGGGGSGGGGSGGGGSGGGGSGAPLKIQAYFNETMDLPCQFANSQNISLSELVVLWQDQENLVLNEVYLGKEKFDSVHSKYMGRTSFDSDSWTLRLHNLQIKDKGLYQCIIIHKKPTGMIRIHQMNSELSVL

SEQ ID NO: 983 - protein, 645 aa, synthetic construct
  REGION 1..645: note = LAG3 112-156-sugemalimab antibody heavy chain -CD86 IgV-Q25A/F33L/H90I
GRLPLQPRVQLDERGRQRGDFSLWLRPARRADAGEYRAAVHLRDRGGGGSGGGGSGGGGSGGGGSGEVQLLESGGGLVQPGGSLRLSCAASGFTFSSYAMSWVRQAPGKGLEWVSGISGSGGFTYYADSVKGRFTISRDNSKNTLYLQMNSLRAEDTAVYYCAKPPRGYNYGPFDYWGQGTLVTVSSASTKGPSVFPLAPCSRSTSESTAALGCLVKDYFPEPVTVSWNSGALTSGVHTFPAVLQSSGLYSLSSVVTVPSSSLGTKTYTCNVDHKPSNTKVDKRVESKYGPPCPPCPAPEFLGGPSVFLFPPKPKDTLMISRTPEVTCVVVDVSQEDPEVQFNWYVDGVEVHNAKTKPREEQFNSTYRVVSVLTVLHQDWLNGKEYKCKVSNKGLPSSIEKTISKAKGQPREPQVYTLPPSQEEMTKNQVSLTCLVKGFYPSDIAVEWESNGQPENNYKTTPPVLDSDGSFFLYSRLTVDKSRWQEGNVFSCSVMHEALHNHYTQKSLSLSLGAGGGGSGGGGSGGGGSGGGGSGAPLKIQAYFNETADLPCQFANSQNASLSELVVLWQDQENLVLNEVYLGKEKFDSVHSKYMGRTSFDSDSWTLRLHNLQIKDKGLYQCIIIHKKPTGMIRIHQMNSELSVL

SEQ ID NO: 984 - protein, 645 aa, synthetic construct
  REGION 1..645: note = LAG3 112-156-sugemalimab antibody heavy chain -CD86 IgV-Q25M/F33L/H90I
GRLPLQPRVQLDERGRQRGDFSLWLRPARRADAGEYRAAVHLRDRGGGGSGGGGSGGGGSGGGGSGEVQLLESGGGLVQPGGSLRLSCAASGFTFSSYAMSWVRQAPGKGLEWVSGISGSGGFTYYADSVKGRFTISRDNSKNTLYLQMNSLRAEDTAVYYCAKPPRGYNYGPFDYWGQGTLVTVSSASTKGPSVFPLAPCSRSTSESTAALGCLVKDYFPEPVTVSWNSGALTSGVHTFPAVLQSSGLYSLSSVVTVPSSSLGTKTYTCNVDHKPSNTKVDKRVESKYGPPCPPCPAPEFLGGPSVFLFPPKPKDTLMISRTPEVTCVVVDVSQEDPEVQFNWYVDGVEVHNAKTKPREEQFNSTYRVVSVLTVLHQDWLNGKEYKCKVSNKGLPSSIEKTISKAKGQPREPQVYTLPPSQEEMTKNQVSLTCLVKGFYPSDIAVEWESNGQPENNYKTTPPVLDSDGSFFLYSRLTVDKSRWQEGNVFSCSVMHEALHNHYTQKSLSLSLGAGGGGSGGGGSGGGGSGGGGSGAPLKIQAYFNETADLPCQFANSQNMSLSELVVLWQDQENLVLNEVYLGKEKFDSVHSKYMGRTSFDSDSWTLRLHNLQIKDKGLYQCIIIHKKPTGMIRIHQMNSELSVL

SEQ ID NO: 985 - protein, 645 aa, synthetic construct
  REGION 1..645: note = LAG3 112-156-sugemalimab antibody heavy chain -CD86 IgV-Q25I/F33M/H90I
GRLPLQPRVQLDERGRQRGDFSLWLRPARRADAGEYRAAVHLRDRGGGGSGGGGSGGGGSGGGGSGEVQLLESGGGLVQPGGSLRLSCAASGFTFSSYAMSWVRQAPGKGLEWVSGISGSGGFTYYADSVKGRFTISRDNSKNTLYLQMNSLRAEDTAVYYCAKPPRGYNYGPFDYWGQGTLVTVSSASTKGPSVFPLAPCSRSTSESTAALGCLVKDYFPEPVTVSWNSGALTSGVHTFPAVLQSSGLYSLSSVVTVPSSSLGTKTYTCNVDHKPSNTKVDKRVESKYGPPCPPCPAPEFLGGPSVFLFPPKPKDTLMISRTPEVTCVVVDVSQEDPEVQFNWYVDGVEVHNAKTKPREEQFNSTYRVVSVLTVLHQDWLNGKEYKCKVSNKGLPSSIEKTISKAKGQPREPQVYTLPPSQEEMTKNQVSLTCLVKGFYPSDIAVEWESNGQPENNYKTTPPVLDSDGSFFLYSRLTVDKSRWQEGNVFSCSVMHEALHNHYTQKSLSLSLGAGGGGSGGGGSGGGGSGGGGSGAPLKIQAYFNETADLPCQFANSQNISLSELVVMWQDQENLVLNEVYLGKEKFDSVHSKYMGRTSFDSDSWTLRLHNLQIKDKGLYQCIIIHKKPTGMIRIHQMNSELSVL

SEQ ID NO: 986 - protein, 645 aa, synthetic construct
  REGION 1..645: note = LAG3 112-156-sugemalimab antibody heavy chain -CD86 IgV-Q25I/F33L/I89V/H90I
GRLPLQPRVQLDERGRQRGDFSLWLRPARRADAGEYRAAVHLRDRGGGGSGGGGSGGGGSGGGGSGEVQLLESGGGLVQPGGSLRLSCAASGFTFSSYAMSWVRQAPGKGLEWVSGISGSGGFTYYADSVKGRFTISRDNSKNTLYLQMNSLRAEDTAVYYCAKPPRGYNYGPFDYWGQGTLVTVSSASTKGPSVFPLAPCSRSTSESTAALGCLVKDYFPEPVTVSWNSGALTSGVHTFPAVLQSSGLYSLSSVVTVPSSSLGTKTYTCNVDHKPSNTKVDKRVESKYGPPCPPCPAPEFLGGPSVFLFPPKPKDTLMISRTPEVTCVVVDVSQEDPEVQFNWYVDGVEVHNAKTKPREEQFNSTYRVVSVLTVLHQDWLNGKEYKCKVSNKGLPSSIEKTISKAKGQPREPQVYTLPPSQEEMTKNQVSLTCLVKGFYPSDIAVEWESNGQPENNYKTTPPVLDSDGSFFLYSRLTVDKSRWQEGNVFSCSVMHEALHNHYTQKSLSLSLGAGGGGSGGGGSGGGGSGGGGSGAPLKIQAYFNETADLPCQFANSQNISLSELVVLWQDQENLVLNEVYLGKEKFDSVHSKYMGRTSFDSDSWTLRLHNLQIKDKGLYQCIVIHKKPTGMIRIHQMNSELSVL

SEQ ID NO: 987 - protein, 645 aa, synthetic construct
  REGION 1..645: note = LAG3 112-156-sugemalimab antibody heavy chain -CD86 IgV-Q25I/F33L/I89F/H90I
GRLPLQPRVQLDERGRQRGDFSLWLRPARRADAGEYRAAVHLRDRGGGGSGGGGSGGGGSGGGGSGEVQLLESGGGLVQPGGSLRLSCAASGFTFSSYAMSWVRQAPGKGLEWVSGISGSGGFTYYADSVKGRFTISRDNSKNTLYLQMNSLRAEDTAVYYCAKPPRGYNYGPFDYWGQGTLVTVSSASTKGPSVFPLAPCSRSTSESTAALGCLVKDYFPEPVTVSWNSGALTSGVHTFPAVLQSSGLYSLSSVVTVPSSSLGTKTYTCNVDHKPSNTKVDKRVESKYGPPCPPCPAPEFLGGPSVFLFPPKPKDTLMISRTPEVTCVVVDVSQEDPEVQFNWYVDGVEVHNAKTKPREEQFNSTYRVVSVLTVLHQDWLNGKEYKCKVSNKGLPSSIEKTISKAKGQPREPQVYTLPPSQEEMTKNQVSLTCLVKGFYPSDIAVEWESNGQPENNYKTTPPVLDSDGSFFLYSRLTVDKSRWQEGNVFSCSVMHEALHNHYTQKSLSLSLGAGGGGSGGGGSGGGGSGGGGSGAPLKIQAYFNETADLPCQFANSQNISLSELVVLWQDQENLVLNEVYLGKEKFDSVHSKYMGRTSFDSDSWTLRLHNLQIKDKGLYQCIFIHKKPTGMIRIHQMNSELSVL

SEQ ID NO: 988 - protein, 645 aa, synthetic construct
  REGION 1..645: note = LAG3 112-156-sugemalimab antibody heavy chain -CD86 IgV-Q25I/F33L/I89M/H90I
GRLPLQPRVQLDERGRQRGDFSLWLRPARRADAGEYRAAVHLRDRGGGGSGGGGSGGGGSGGGGSGEVQLLESGGGLVQPGGSLRLSCAASGFTFSSYAMSWVRQAPGKGLEWVSGISGSGGFTYYADSVKGRFTISRDNSKNTLYLQMNSLRAEDTAVYYCAKPPRGYNYGPFDYWGQGTLVTVSSASTKGPSVFPLAPCSRSTSESTAALGCLVKDYFPEPVTVSWNSGALTSGVHTFPAVLQSSGLYSLSSVVTVPSSSLGTKTYTCNVDHKPSNTKVDKRVESKYGPPCPPCPAPEFLGGPSVFLFPPKPKDTLMISRTPEVTCVVVDVSQEDPEVQFNWYVDGVEVHNAKTKPREEQFNSTYRVVSVLTVLHQDWLNGKEYKCKVSNKGLPSSIEKTISKAKGQPREPQVYTLPPSQEEMTKNQVSLTCLVKGFYPSDIAVEWESNGQPENNYKTTPPVLDSDGSFFLYSRLTVDKSRWQEGNVFSCSVMHEALHNHYTQKSLSLSLGAGGGGSGGGGSGGGGSGGGGSGAPLKIQAYFNETADLPCQFANSQNISLSELVVLWQDQENLVLNEVYLGKEKFDSVHSKYMGRTSFDSDSWTLRLHNLQIKDKGLYQCIMIHKKPTGMIRIHQMNSELSVL

SEQ ID NO: 989 - protein, 645 aa, synthetic construct
  REGION 1..645: note = LAG3 112-156-sugemalimab antibody heavy chain -CD86 IgV-Q25I/F33L/H90M
GRLPLQPRVQLDERGRQRGDFSLWLRPARRADAGEYRAAVHLRDRGGGGSGGGGSGGGGSGGGGSGEVQLLESGGGLVQPGGSLRLSCAASGFTFSSYAMSWVRQAPGKGLEWVSGISGSGGFTYYADSVKGRFTISRDNSKNTLYLQMNSLRAEDTAVYYCAKPPRGYNYGPFDYWGQGTLVTVSSASTKGPSVFPLAPCSRSTSESTAALGCLVKDYFPEPVTVSWNSGALTSGVHTFPAVLQSSGLYSLSSVVTVPSSSLGTKTYTCNVDHKPSNTKVDKRVESKYGPPCPPCPAPEFLGGPSVFLFPPKPKDTLMISRTPEVTCVVVDVSQEDPEVQFNWYVDGVEVHNAKTKPREEQFNSTYRVVSVLTVLHQDWLNGKEYKCKVSNKGLPSSIEKTISKAKGQPREPQVYTLPPSQEEMTKNQVSLTCLVKGFYPSDIAVEWESNGQPENNYKTTPPVLDSDGSFFLYSRLTVDKSRWQEGNVFSCSVMHEALHNHYTQKSLSLSLGAGGGGSGGGGSGGGGSGGGGSGAPLKIQAYFNETADLPCQFANSQNISLSELVVLWQDQENLVLNEVYLGKEKFDSVHSKYMGRTSFDSDSWTLRLHNLQIKDKGLYQCIIMHKKPTGMIRIHQMNSELSVL

SEQ ID NO: 990 - protein, 645 aa, synthetic construct
  REGION 1..645: note = LAG3 112-156-sugemalimab antibody heavy chain -CD86 IgV
GRLPLQPRVQLDERGRQRGDFSLWLRPARRADAGEYRAAVHLRDRGGGGSGGGGSGGGGSGGGGSGEVQLLESGGGLVQPGGSLRLSCAASGFTFSSYAMSWVRQAPGKGLEWVSGISGSGGFTYYADSVKGRFTISRDNSKNTLYLQMNSLRAEDTAVYYCAKPPRGYNYGPFDYWGQGTLVTVSSASTKGPSVFPLAPCSRSTSESTAALGCLVKDYFPEPVTVSWNSGALTSGVHTFPAVLQSSGLYSLSSVVTVPSSSLGTKTYTCNVDHKPSNTKVDKRVESKYGPPCPPCPAPEFLGGPSVFLFPPKPKDTLMISRTPEVTCVVVDVSQEDPEVQFNWYVDGVEVHNAKTKPREEQFNSTYRVVSVLTVLHQDWLNGKEYKCKVSNKGLPSSIEKTISKAKGQPREPQVYTLPPSQEEMTKNQVSLTCLVKGFYPSDIAVEWESNGQPENNYKTTPPVLDSDGSFFLYSRLTVDKSRWQEGNVFSCSVMHEALHNHYTQKSLSLSLGAGGGGSGGGGSGGGGSGGGGSGAPLKIQAYFNETADLPCQFANSQNQSLSELVVFWQDQENLVLNEVYLGKEKFDSVHSKYMGRTSFDSDSWTLRLHNLQIKDKGLYQCIIHHKKPTGMIRIHQMNSELSVL

SEQ ID NO: 991 - protein, 635 aa, synthetic construct
  REGION 1..635: note = LAG3 122-156-sugemalimab antibody heavy chain -CD86 IgV-Q25I/F33L/H90I
LDERGRQRGDFSLWLRPARRADAGEYRAAVHLRDRGGGGSGGGGSGGGGSGGGGSGEVQLLESGGGLVQPGGSLRLSCAASGFTFSSYAMSWVRQAPGKGLEWVSGISGSGGFTYYADSVKGRFTISRDNSKNTLYLQMNSLRAEDTAVYYCAKPPRGYNYGPFDYWGQGTLVTVSSASTKGPSVFPLAPCSRSTSESTAALGCLVKDYFPEPVTVSWNSGALTSGVHTFPAVLQSSGLYSLSSVVTVPSSSLGTKTYTCNVDHKPSNTKVDKRVESKYGPPCPPCPAPEFLGGPSVFLFPPKPKDTLMISRTPEVTCVVVDVSQEDPEVQFNWYVDGVEVHNAKTKPREEQFNSTYRVVSVLTVLHQDWLNGKEYKCKVSNKGLPSSIEKTISKAKGQPREPQVYTLPPSQEEMTKNQVSLTCLVKGFYPSDIAVEWESNGQPENNYKTTPPVLDSDGSFFLYSRLTVDKSRWQEGNVFSCSVMHEALHNHYTQKSLSLSLGAGGGGSGGGGSGGGGSGGGGSGAPLKIQAYFNETADLPCQFANSQNISLSELVVLWQDQENLVLNEVYLGKEKFDSVHSKYMGRTSFDSDSWTLRLHNLQIKDKGLYQCIIIHKKPTGMIRIHQMNSELSVL

SEQ ID NO: 992 - protein, 635 aa, synthetic construct
  REGION 1..635: note = LAG3 122-156-sugemalimab antibody heavy chain -CD86-ECD-Q25V/F33L/H90I
LDERGRQRGDFSLWLRPARRADAGEYRAAVHLRDRGGGGSGGGGSGGGGSGGGGSGEVQLLESGGGLVQPGGSLRLSCAASGFTFSSYAMSWVRQAPGKGLEWVSGISGSGGFTYYADSVKGRFTISRDNSKNTLYLQMNSLRAEDTAVYYCAKPPRGYNYGPFDYWGQGTLVTVSSASTKGPSVFPLAPCSRSTSESTAALGCLVKDYFPEPVTVSWNSGALTSGVHTFPAVLQSSGLYSLSSVVTVPSSSLGTKTYTCNVDHKPSNTKVDKRVESKYGPPCPPCPAPEFLGGPSVFLFPPKPKDTLMISRTPEVTCVVVDVSQEDPEVQFNWYVDGVEVHNAKTKPREEQFNSTYRVVSVLTVLHQDWLNGKEYKCKVSNKGLPSSIEKTISKAKGQPREPQVYTLPPSQEEMTKNQVSLTCLVKGFYPSDIAVEWESNGQPENNYKTTPPVLDSDGSFFLYSRLTVDKSRWQEGNVFSCSVMHEALHNHYTQKSLSLSLGAGGGGSGGGGSGGGGSGGGGSGAPLKIQAYFNETADLPCQFANSQNVSLSELVVLWQDQENLVLNEVYLGKEKFDSVHSKYMGRTSFDSDSWTLRLHNLQIKDKGLYQCIIIHKKPTGMIRIHQMNSELSVL

SEQ ID NO: 993 - protein, 635 aa, synthetic construct
  REGION 1..635: note = LAG3 122-156-sugemalimab antibody heavy chain -CD86 IgV-Q25I/F33V/H90I
LDERGRQRGDFSLWLRPARRADAGEYRAAVHLRDRGGGGSGGGGSGGGGSGGGGSGEVQLLESGGGLVQPGGSLRLSCAASGFTFSSYAMSWVRQAPGKGLEWVSGISGSGGFTYYADSVKGRFTISRDNSKNTLYLQMNSLRAEDTAVYYCAKPPRGYNYGPFDYWGQGTLVTVSSASTKGPSVFPLAPCSRSTSESTAALGCLVKDYFPEPVTVSWNSGALTSGVHTFPAVLQSSGLYSLSSVVTVPSSSLGTKTYTCNVDHKPSNTKVDKRVESKYGPPCPPCPAPEFLGGPSVFLFPPKPKDTLMISRTPEVTCVVVDVSQEDPEVQFNWYVDGVEVHNAKTKPREEQFNSTYRVVSVLTVLHQDWLNGKEYKCKVSNKGLPSSIEKTISKAKGQPREPQVYTLPPSQEEMTKNQVSLTCLVKGFYPSDIAVEWESNGQPENNYKTTPPVLDSDGSFFLYSRLTVDKSRWQEGNVFSCSVMHEALHNHYTQKSLSLSLGAGGGGSGGGGSGGGGSGGGGSGAPLKIQAYFNETADLPCQFANSQNISLSELVVVWQDQENLVLNEVYLGKEKFDSVHSKYMGRTSFDSDSWTLRLHNLQIKDKGLYQCIIIHKKPTGMIRIHQMNSELSVL

SEQ ID NO: 994 - protein, 635 aa, synthetic construct
  REGION 1..635: note = LAG3 122-156-sugemalimab antibody heavy chain -CD86 IgV-Q25V/F33V/H90I
LDERGRQRGDFSLWLRPARRADAGEYRAAVHLRDRGGGGSGGGGSGGGGSGGGGSGEVQLLESGGGLVQPGGSLRLSCAASGFTFSSYAMSWVRQAPGKGLEWVSGISGSGGFTYYADSVKGRFTISRDNSKNTLYLQMNSLRAEDTAVYYCAKPPRGYNYGPFDYWGQGTLVTVSSASTKGPSVFPLAPCSRSTSESTAALGCLVKDYFPEPVTVSWNSGALTSGVHTFPAVLQSSGLYSLSSVVTVPSSSLGTKTYTCNVDHKPSNTKVDKRVESKYGPPCPPCPAPEFLGGPSVFLFPPKPKDTLMISRTPEVTCVVVDVSQEDPEVQFNWYVDGVEVHNAKTKPREEQFNSTYRVVSVLTVLHQDWLNGKEYKCKVSNKGLPSSIEKTISKAKGQPREPQVYTLPPSQEEMTKNQVSLTCLVKGFYPSDIAVEWESNGQPENNYKTTPPVLDSDGSFFLYSRLTVDKSRWQEGNVFSCSVMHEALHNHYTQKSLSLSLGAGGGGSGGGGSGGGGSGGGGSGAPLKIQAYFNETADLPCQFANSQNVSLSELVVVWQDQENLVLNEVYLGKEKFDSVHSKYMGRTSFDSDSWTLRLHNLQIKDKGLYQCIIIHKKPTGMIRIHQMNSELSVL

SEQ ID NO: 995 - protein, 635 aa, synthetic construct
  REGION 1..635: note = LAG3 122-156-sugemalimab antibody heavy chain -CD86 IgV-Q25I/F33L/H90V
LDERGRQRGDFSLWLRPARRADAGEYRAAVHLRDRGGGGSGGGGSGGGGSGGGGSGEVQLLESGGGLVQPGGSLRLSCAASGFTFSSYAMSWVRQAPGKGLEWVSGISGSGGFTYYADSVKGRFTISRDNSKNTLYLQMNSLRAEDTAVYYCAKPPRGYNYGPFDYWGQGTLVTVSSASTKGPSVFPLAPCSRSTSESTAALGCLVKDYFPEPVTVSWNSGALTSGVHTFPAVLQSSGLYSLSSVVTVPSSSLGTKTYTCNVDHKPSNTKVDKRVESKYGPPCPPCPAPEFLGGPSVFLFPPKPKDTLMISRTPEVTCVVVDVSQEDPEVQFNWYVDGVEVHNAKTKPREEQFNSTYRVVSVLTVLHQDWLNGKEYKCKVSNKGLPSSIEKTISKAKGQPREPQVYTLPPSQEEMTKNQVSLTCLVKGFYPSDIAVEWESNGQPENNYKTTPPVLDSDGSFFLYSRLTVDKSRWQEGNVFSCSVMHEALHNHYTQKSLSLSLGAGGGGSGGGGSGGGGSGGGGSGAPLKIQAYFNETADLPCQFANSQNISLSELVVLWQDQENLVLNEVYLGKEKFDSVHSKYMGRTSFDSDSWTLRLHNLQIKDKGLYQCIIVHKKPTGMIRIHQMNSELSVL

SEQ ID NO: 996 - protein, 635 aa, synthetic construct
  REGION 1..635: note = LAG3 122-156-sugemalimab antibody heavy chain -CD86 IgV-Q25V/F33L/H90V
LDERGRQRGDFSLWLRPARRADAGEYRAAVHLRDRGGGGSGGGGSGGGGSGGGGSGEVQLLESGGGLVQPGGSLRLSCAASGFTFSSYAMSWVRQAPGKGLEWVSGISGSGGFTYYADSVKGRFTISRDNSKNTLYLQMNSLRAEDTAVYYCAKPPRGYNYGPFDYWGQGTLVTVSSASTKGPSVFPLAPCSRSTSESTAALGCLVKDYFPEPVTVSWNSGALTSGVHTFPAVLQSSGLYSLSSVVTVPSSSLGTKTYTCNVDHKPSNTKVDKRVESKYGPPCPPCPAPEFLGGPSVFLFPPKPKDTLMISRTPEVTCVVVDVSQEDPEVQFNWYVDGVEVHNAKTKPREEQFNSTYRVVSVLTVLHQDWLNGKEYKCKVSNKGLPSSIEKTISKAKGQPREPQVYTLPPSQEEMTKNQVSLTCLVKGFYPSDIAVEWESNGQPENNYKTTPPVLDSDGSFFLYSRLTVDKSRWQEGNVFSCSVMHEALHNHYTQKSLSLSLGAGGGGSGGGGSGGGGSGGGGSGAPLKIQAYFNETADLPCQFANSQNVSLSELVVLWQDQENLVLNEVYLGKEKFDSVHSKYMGRTSFDSDSWTLRLHNLQIKDKGLYQCIIVHKKPTGMIRIHQMNSELSVL

SEQ ID NO: 997 - protein, 635 aa, synthetic construct
  REGION 1..635: note = LAG3 122-156-sugemalimab antibody heavy chain -CD86 IgV-Q25I/F33V/H90V
LDERGRQRGDFSLWLRPARRADAGEYRAAVHLRDRGGGGSGGGGSGGGGSGGGGSGEVQLLESGGGLVQPGGSLRLSCAASGFTFSSYAMSWVRQAPGKGLEWVSGISGSGGFTYYADSVKGRFTISRDNSKNTLYLQMNSLRAEDTAVYYCAKPPRGYNYGPFDYWGQGTLVTVSSASTKGPSVFPLAPCSRSTSESTAALGCLVKDYFPEPVTVSWNSGALTSGVHTFPAVLQSSGLYSLSSVVTVPSSSLGTKTYTCNVDHKPSNTKVDKRVESKYGPPCPPCPAPEFLGGPSVFLFPPKPKDTLMISRTPEVTCVVVDVSQEDPEVQFNWYVDGVEVHNAKTKPREEQFNSTYRVVSVLTVLHQDWLNGKEYKCKVSNKGLPSSIEKTISKAKGQPREPQVYTLPPSQEEMTKNQVSLTCLVKGFYPSDIAVEWESNGQPENNYKTTPPVLDSDGSFFLYSRLTVDKSRWQEGNVFSCSVMHEALHNHYTQKSLSLSLGAGGGGSGGGGSGGGGSGGGGSGAPLKIQAYFNETADLPCQFANSQNISLSELVVVWQDQENLVLNEVYLGKEKFDSVHSKYMGRTSFDSDSWTLRLHNLQIKDKGLYQCIIVHKKPTGMIRIHQMNSELSVL

SEQ ID NO: 998 - protein, 635 aa, synthetic construct
  REGION 1..635: note = LAG3 122-156-sugemalimab antibody heavy chain -CD86 IgV-Q25V/F33V/H90V
LDERGRQRGDFSLWLRPARRADAGEYRAAVHLRDRGGGGSGGGGSGGGGSGGGGSGEVQLLESGGGLVQPGGSLRLSCAASGFTFSSYAMSWVRQAPGKGLEWVSGISGSGGFTYYADSVKGRFTISRDNSKNTLYLQMNSLRAEDTAVYYCAKPPRGYNYGPFDYWGQGTLVTVSSASTKGPSVFPLAPCSRSTSESTAALGCLVKDYFPEPVTVSWNSGALTSGVHTFPAVLQSSGLYSLSSVVTVPSSSLGTKTYTCNVDHKPSNTKVDKRVESKYGPPCPPCPAPEFLGGPSVFLFPPKPKDTLMISRTPEVTCVVVDVSQEDPEVQFNWYVDGVEVHNAKTKPREEQFNSTYRVVSVLTVLHQDWLNGKEYKCKVSNKGLPSSIEKTISKAKGQPREPQVYTLPPSQEEMTKNQVSLTCLVKGFYPSDIAVEWESNGQPENNYKTTPPVLDSDGSFFLYSRLTVDKSRWQEGNVFSCSVMHEALHNHYTQKSLSLSLGAGGGGSGGGGSGGGGSGGGGSGAPLKIQAYFNETADLPCQFANSQNVSLSELVVVWQDQENLVLNEVYLGKEKFDSVHSKYMGRTSFDSDSWTLRLHNLQIKDKGLYQCIIVHKKPTGMIRIHQMNSELSVL

SEQ ID NO: 999 - protein, 635 aa, synthetic construct
  REGION 1..635: note = LAG3 122-156-sugemalimab antibody heavy chain -CD86 IgV-A13L/Q25I/F33L/H90I
LDERGRQRGDFSLWLRPARRADAGEYRAAVHLRDRGGGGSGGGGSGGGGSGGGGSGEVQLLESGGGLVQPGGSLRLSCAASGFTFSSYAMSWVRQAPGKGLEWVSGISGSGGFTYYADSVKGRFTISRDNSKNTLYLQMNSLRAEDTAVYYCAKPPRGYNYGPFDYWGQGTLVTVSSASTKGPSVFPLAPCSRSTSESTAALGCLVKDYFPEPVTVSWNSGALTSGVHTFPAVLQSSGLYSLSSVVTVPSSSLGTKTYTCNVDHKPSNTKVDKRVESKYGPPCPPCPAPEFLGGPSVFLFPPKPKDTLMISRTPEVTCVVVDVSQEDPEVQFNWYVDGVEVHNAKTKPREEQFNSTYRVVSVLTVLHQDWLNGKEYKCKVSNKGLPSSIEKTISKAKGQPREPQVYTLPPSQEEMTKNQVSLTCLVKGFYPSDIAVEWESNGQPENNYKTTPPVLDSDGSFFLYSRLTVDKSRWQEGNVFSCSVMHEALHNHYTQKSLSLSLGAGGGGSGGGGSGGGGSGGGGSGAPLKIQAYFNETLDLPCQFANSQNISLSELVVLWQDQENLVLNEVYLGKEKFDSVHSKYMGRTSFDSDSWTLRLHNLQIKDKGLYQCIIIHKKPTGMIRIHQMNSELSVL

SEQ ID NO: 1000 - protein, 635 aa, synthetic construct
  REGION 1..635: note = LAG3 122-156-sugemalimab antibody heavy chain -CD86 IgV-A13I/Q25I/F33L/H90I
LDERGRQRGDFSLWLRPARRADAGEYRAAVHLRDRGGGGSGGGGSGGGGSGGGGSGEVQLLESGGGLVQPGGSLRLSCAASGFTFSSYAMSWVRQAPGKGLEWVSGISGSGGFTYYADSVKGRFTISRDNSKNTLYLQMNSLRAEDTAVYYCAKPPRGYNYGPFDYWGQGTLVTVSSASTKGPSVFPLAPCSRSTSESTAALGCLVKDYFPEPVTVSWNSGALTSGVHTFPAVLQSSGLYSLSSVVTVPSSSLGTKTYTCNVDHKPSNTKVDKRVESKYGPPCPPCPAPEFLGGPSVFLFPPKPKDTLMISRTPEVTCVVVDVSQEDPEVQFNWYVDGVEVHNAKTKPREEQFNSTYRVVSVLTVLHQDWLNGKEYKCKVSNKGLPSSIEKTISKAKGQPREPQVYTLPPSQEEMTKNQVSLTCLVKGFYPSDIAVEWESNGQPENNYKTTPPVLDSDGSFFLYSRLTVDKSRWQEGNVFSCSVMHEALHNHYTQKSLSLSLGAGGGGSGGGGSGGGGSGGGGSGAPLKIQAYFNETIDLPCQFANSQNISLSELVVLWQDQENLVLNEVYLGKEKFDSVHSKYMGRTSFDSDSWTLRLHNLQIKDKGLYQCIIIHKKPTGMIRIHQMNSELSVL

SEQ ID NO: 1001 - protein, 635 aa, synthetic construct
  REGION 1..635: note = LAG3 122-156-sugemalimab antibody heavy chain -CD86 IgV-A13L/Q25V/F33L/H90I
LDERGRQRGDFSLWLRPARRADAGEYRAAVHLRDRGGGGSGGGGSGGGGSGGGGSGEVQLLESGGGLVQPGGSLRLSCAASGFTFSSYAMSWVRQAPGKGLEWVSGISGSGGFTYYADSVKGRFTISRDNSKNTLYLQMNSLRAEDTAVYYCAKPPRGYNYGPFDYWGQGTLVTVSSASTKGPSVFPLAPCSRSTSESTAALGCLVKDYFPEPVTVSWNSGALTSGVHTFPAVLQSSGLYSLSSVVTVPSSSLGTKTYTCNVDHKPSNTKVDKRVESKYGPPCPPCPAPEFLGGPSVFLFPPKPKDTLMISRTPEVTCVVVDVSQEDPEVQFNWYVDGVEVHNAKTKPREEQFNSTYRVVSVLTVLHQDWLNGKEYKCKVSNKGLPSSIEKTISKAKGQPREPQVYTLPPSQEEMTKNQVSLTCLVKGFYPSDIAVEWESNGQPENNYKTTPPVLDSDGSFFLYSRLTVDKSRWQEGNVFSCSVMHEALHNHYTQKSLSLSLGAGGGGSGGGGSGGGGSGGGGSGAPLKIQAYFNETLDLPCQFANSQNVSLSELVVLWQDQENLVLNEVYLGKEKFDSVHSKYMGRTSFDSDSWTLRLHNLQIKDKGLYQCIIIHKKPTGMIRIHQMNSELSVL

SEQ ID NO: 1002 - protein, 635 aa, synthetic construct
  REGION 1..635: note = LAG3 122-156-sugemalimab antibody heavy chain -CD86 IgV-A13I/Q25V/F33L/H90I
LDERGRQRGDFSLWLRPARRADAGEYRAAVHLRDRGGGGSGGGGSGGGGSGGGGSGEVQLLESGGGLVQPGGSLRLSCAASGFTFSSYAMSWVRQAPGKGLEWVSGISGSGGFTYYADSVKGRFTISRDNSKNTLYLQMNSLRAEDTAVYYCAKPPRGYNYGPFDYWGQGTLVTVSSASTKGPSVFPLAPCSRSTSESTAALGCLVKDYFPEPVTVSWNSGALTSGVHTFPAVLQSSGLYSLSSVVTVPSSSLGTKTYTCNVDHKPSNTKVDKRVESKYGPPCPPCPAPEFLGGPSVFLFPPKPKDTLMISRTPEVTCVVVDVSQEDPEVQFNWYVDGVEVHNAKTKPREEQFNSTYRVVSVLTVLHQDWLNGKEYKCKVSNKGLPSSIEKTISKAKGQPREPQVYTLPPSQEEMTKNQVSLTCLVKGFYPSDIAVEWESNGQPENNYKTTPPVLDSDGSFFLYSRLTVDKSRWQEGNVFSCSVMHEALHNHYTQKSLSLSLGAGGGGSGGGGSGGGGSGGGGSGAPLKIQAYFNETIDLPCQFANSQNVSLSELVVLWQDQENLVLNEVYLGKEKFDSVHSKYMGRTSFDSDSWTLRLHNLQIKDKGLYQCIIIHKKPTGMIRIHQMNSELSVL

SEQ ID NO: 1003 - protein, 635 aa, synthetic construct
  REGION 1..635: note = LAG3 122-156-sugemalimab antibody heavy chain -CD86 IgV-Q25I/F33L/I89L/H90I
LDERGRQRGDFSLWLRPARRADAGEYRAAVHLRDRGGGGSGGGGSGGGGSGGGGSGEVQLLESGGGLVQPGGSLRLSCAASGFTFSSYAMSWVRQAPGKGLEWVSGISGSGGFTYYADSVKGRFTISRDNSKNTLYLQMNSLRAEDTAVYYCAKPPRGYNYGPFDYWGQGTLVTVSSASTKGPSVFPLAPCSRSTSESTAALGCLVKDYFPEPVTVSWNSGALTSGVHTFPAVLQSSGLYSLSSVVTVPSSSLGTKTYTCNVDHKPSNTKVDKRVESKYGPPCPPCPAPEFLGGPSVFLFPPKPKDTLMISRTPEVTCVVVDVSQEDPEVQFNWYVDGVEVHNAKTKPREEQFNSTYRVVSVLTVLHQDWLNGKEYKCKVSNKGLPSSIEKTISKAKGQPREPQVYTLPPSQEEMTKNQVSLTCLVKGFYPSDIAVEWESNGQPENNYKTTPPVLDSDGSFFLYSRLTVDKSRWQEGNVFSCSVMHEALHNHYTQKSLSLSLGAGGGGSGGGGSGGGGSGGGGSGAPLKIQAYFNETADLPCQFANSQNISLSELVVLWQDQENLVLNEVYLGKEKFDSVHSKYMGRTSFDSDSWTLRLHNLQIKDKGLYQCILIHKKPTGMIRIHQMNSELSVL

SEQ ID NO: 1004 - protein, 635 aa, synthetic construct
  REGION 1..635: note = LAG3 122-156-sugemalimab antibody heavy chain -CD86 IgV-Q25I/F33L/M60R/H90I
LDERGRQRGDFSLWLRPARRADAGEYRAAVHLRDRGGGGSGGGGSGGGGSGGGGSGEVQLLESGGGLVQPGGSLRLSCAASGFTFSSYAMSWVRQAPGKGLEWVSGISGSGGFTYYADSVKGRFTISRDNSKNTLYLQMNSLRAEDTAVYYCAKPPRGYNYGPFDYWGQGTLVTVSSASTKGPSVFPLAPCSRSTSESTAALGCLVKDYFPEPVTVSWNSGALTSGVHTFPAVLQSSGLYSLSSVVTVPSSSLGTKTYTCNVDHKPSNTKVDKRVESKYGPPCPPCPAPEFLGGPSVFLFPPKPKDTLMISRTPEVTCVVVDVSQEDPEVQFNWYVDGVEVHNAKTKPREEQFNSTYRVVSVLTVLHQDWLNGKEYKCKVSNKGLPSSIEKTISKAKGQPREPQVYTLPPSQEEMTKNQVSLTCLVKGFYPSDIAVEWESNGQPENNYKTTPPVLDSDGSFFLYSRLTVDKSRWQEGNVFSCSVMHEALHNHYTQKSLSLSLGAGGGGSGGGGSGGGGSGGGGSGAPLKIQAYFNETADLPCQFANSQNISLSELVVLWQDQENLVLNEVYLGKEKFDSVHSKYRGRTSFDSDSWTLRLHNLQIKDKGLYQCIIIHKKPTGMIRIHQMNSELSVL

SEQ ID NO: 1005 - protein, 635 aa, synthetic construct
  REGION 1..635: note = LAG3 122-156-sugemalimab antibody heavy chain -CD86 IgV-Q25V/F33L/I89L/H90I
LDERGRQRGDFSLWLRPARRADAGEYRAAVHLRDRGGGGSGGGGSGGGGSGGGGSGEVQLLESGGGLVQPGGSLRLSCAASGFTFSSYAMSWVRQAPGKGLEWVSGISGSGGFTYYADSVKGRFTISRDNSKNTLYLQMNSLRAEDTAVYYCAKPPRGYNYGPFDYWGQGTLVTVSSASTKGPSVFPLAPCSRSTSESTAALGCLVKDYFPEPVTVSWNSGALTSGVHTFPAVLQSSGLYSLSSVVTVPSSSLGTKTYTCNVDHKPSNTKVDKRVESKYGPPCPPCPAPEFLGGPSVFLFPPKPKDTLMISRTPEVTCVVVDVSQEDPEVQFNWYVDGVEVHNAKTKPREEQFNSTYRVVSVLTVLHQDWLNGKEYKCKVSNKGLPSSIEKTISKAKGQPREPQVYTLPPSQEEMTKNQVSLTCLVKGFYPSDIAVEWESNGQPENNYKTTPPVLDSDGSFFLYSRLTVDKSRWQEGNVFSCSVMHEALHNHYTQKSLSLSLGAGGGGSGGGGSGGGGSGGGGSGAPLKIQAYFNETADLPCQFANSQNVSLSELVVLWQDQENLVLNEVYLGKEKFDSVHSKYMGRTSFDSDSWTLRLHNLQIKDKGLYQCILIHKKPTGMIRIHQMNSELSVL

SEQ ID NO: 1006 - protein, 635 aa, synthetic construct
  REGION 1..635: note = LAG3 122-156-sugemalimab antibody heavy chain -CD86 IgV-Q25V/F33L/M60R/H90I
LDERGRQRGDFSLWLRPARRADAGEYRAAVHLRDRGGGGSGGGGSGGGGSGGGGSGEVQLLESGGGLVQPGGSLRLSCAASGFTFSSYAMSWVRQAPGKGLEWVSGISGSGGFTYYADSVKGRFTISRDNSKNTLYLQMNSLRAEDTAVYYCAKPPRGYNYGPFDYWGQGTLVTVSSASTKGPSVFPLAPCSRSTSESTAALGCLVKDYFPEPVTVSWNSGALTSGVHTFPAVLQSSGLYSLSSVVTVPSSSLGTKTYTCNVDHKPSNTKVDKRVESKYGPPCPPCPAPEFLGGPSVFLFPPKPKDTLMISRTPEVTCVVVDVSQEDPEVQFNWYVDGVEVHNAKTKPREEQFNSTYRVVSVLTVLHQDWLNGKEYKCKVSNKGLPSSIEKTISKAKGQPREPQVYTLPPSQEEMTKNQVSLTCLVKGFYPSDIAVEWESNGQPENNYKTTPPVLDSDGSFFLYSRLTVDKSRWQEGNVFSCSVMHEALHNHYTQKSLSLSLGAGGGGSGGGGSGGGGSGGGGSGAPLKIQAYFNETADLPCQFANSQNVSLSELVVLWQDQENLVLNEVYLGKEKFDSVHSKYRGRTSFDSDSWTLRLHNLQIKDKGLYQCIIIHKKPTGMIRIHQMNSELSVL

SEQ ID NO: 1007 - protein, 635 aa, synthetic construct
  REGION 1..635: note = LAG3 122-156-sugemalimab antibody heavy chain -CD86 IgV-Q25F/F33L/H90I
LDERGRQRGDFSLWLRPARRADAGEYRAAVHLRDRGGGGSGGGGSGGGGSGGGGSGEVQLLESGGGLVQPGGSLRLSCAASGFTFSSYAMSWVRQAPGKGLEWVSGISGSGGFTYYADSVKGRFTISRDNSKNTLYLQMNSLRAEDTAVYYCAKPPRGYNYGPFDYWGQGTLVTVSSASTKGPSVFPLAPCSRSTSESTAALGCLVKDYFPEPVTVSWNSGALTSGVHTFPAVLQSSGLYSLSSVVTVPSSSLGTKTYTCNVDHKPSNTKVDKRVESKYGPPCPPCPAPEFLGGPSVFLFPPKPKDTLMISRTPEVTCVVVDVSQEDPEVQFNWYVDGVEVHNAKTKPREEQFNSTYRVVSVLTVLHQDWLNGKEYKCKVSNKGLPSSIEKTISKAKGQPREPQVYTLPPSQEEMTKNQVSLTCLVKGFYPSDIAVEWESNGQPENNYKTTPPVLDSDGSFFLYSRLTVDKSRWQEGNVFSCSVMHEALHNHYTQKSLSLSLGAGGGGSGGGGSGGGGSGGGGSGAPLKIQAYFNETADLPCQFANSQNFSLSELVVLWQDQENLVLNEVYLGKEKFDSVHSKYMGRTSFDSDSWTLRLHNLQIKDKGLYQCIIIHKKPTGMIRIHQMNSELSVL

SEQ ID NO: 1008 - protein, 635 aa, synthetic construct
  REGION 1..635: note = LAG3 122-156-sugemalimab antibody heavy chain -CD86 IgV-Q25I/F33L/H90F
LDERGRQRGDFSLWLRPARRADAGEYRAAVHLRDRGGGGSGGGGSGGGGSGGGGSGEVQLLESGGGLVQPGGSLRLSCAASGFTFSSYAMSWVRQAPGKGLEWVSGISGSGGFTYYADSVKGRFTISRDNSKNTLYLQMNSLRAEDTAVYYCAKPPRGYNYGPFDYWGQGTLVTVSSASTKGPSVFPLAPCSRSTSESTAALGCLVKDYFPEPVTVSWNSGALTSGVHTFPAVLQSSGLYSLSSVVTVPSSSLGTKTYTCNVDHKPSNTKVDKRVESKYGPPCPPCPAPEFLGGPSVFLFPPKPKDTLMISRTPEVTCVVVDVSQEDPEVQFNWYVDGVEVHNAKTKPREEQFNSTYRVVSVLTVLHQDWLNGKEYKCKVSNKGLPSSIEKTISKAKGQPREPQVYTLPPSQEEMTKNQVSLTCLVKGFYPSDIAVEWESNGQPENNYKTTPPVLDSDGSFFLYSRLTVDKSRWQEGNVFSCSVMHEALHNHYTQKSLSLSLGAGGGGSGGGGSGGGGSGGGGSGAPLKIQAYFNETADLPCQFANSQNISLSELVVLWQDQENLVLNEVYLGKEKFDSVHSKYMGRTSFDSDSWTLRLHNLQIKDKGLYQCIIFHKKPTGMIRIHQMNSELSVL

SEQ ID NO: 1009 - protein, 635 aa, synthetic construct
  REGION 1..635: note = LAG3 122-156-sugemalimab antibody heavy chain -CD86 IgV-Q25I/F33A/H90I
LDERGRQRGDFSLWLRPARRADAGEYRAAVHLRDRGGGGSGGGGSGGGGSGGGGSGEVQLLESGGGLVQPGGSLRLSCAASGFTFSSYAMSWVRQAPGKGLEWVSGISGSGGFTYYADSVKGRFTISRDNSKNTLYLQMNSLRAEDTAVYYCAKPPRGYNYGPFDYWGQGTLVTVSSASTKGPSVFPLAPCSRSTSESTAALGCLVKDYFPEPVTVSWNSGALTSGVHTFPAVLQSSGLYSLSSVVTVPSSSLGTKTYTCNVDHKPSNTKVDKRVESKYGPPCPPCPAPEFLGGPSVFLFPPKPKDTLMISRTPEVTCVVVDVSQEDPEVQFNWYVDGVEVHNAKTKPREEQFNSTYRVVSVLTVLHQDWLNGKEYKCKVSNKGLPSSIEKTISKAKGQPREPQVYTLPPSQEEMTKNQVSLTCLVKGFYPSDIAVEWESNGQPENNYKTTPPVLDSDGSFFLYSRLTVDKSRWQEGNVFSCSVMHEALHNHYTQKSLSLSLGAGGGGSGGGGSGGGGSGGGGSGAPLKIQAYFNETADLPCQFANSQNISLSELVVAWQDQENLVLNEVYLGKEKFDSVHSKYMGRTSFDSDSWTLRLHNLQIKDKGLYQCIIIHKKPTGMIRIHQMNSELSVL

SEQ ID NO: 1010 - protein, 635 aa, synthetic construct
  REGION 1..635: note = LAG3 122-156-sugemalimab antibody heavy chain -CD86 IgV-Q25I/H90I
LDERGRQRGDFSLWLRPARRADAGEYRAAVHLRDRGGGGSGGGGSGGGGSGGGGSGEVQLLESGGGLVQPGGSLRLSCAASGFTFSSYAMSWVRQAPGKGLEWVSGISGSGGFTYYADSVKGRFTISRDNSKNTLYLQMNSLRAEDTAVYYCAKPPRGYNYGPFDYWGQGTLVTVSSASTKGPSVFPLAPCSRSTSESTAALGCLVKDYFPEPVTVSWNSGALTSGVHTFPAVLQSSGLYSLSSVVTVPSSSLGTKTYTCNVDHKPSNTKVDKRVESKYGPPCPPCPAPEFLGGPSVFLFPPKPKDTLMISRTPEVTCVVVDVSQEDPEVQFNWYVDGVEVHNAKTKPREEQFNSTYRVVSVLTVLHQDWLNGKEYKCKVSNKGLPSSIEKTISKAKGQPREPQVYTLPPSQEEMTKNQVSLTCLVKGFYPSDIAVEWESNGQPENNYKTTPPVLDSDGSFFLYSRLTVDKSRWQEGNVFSCSVMHEALHNHYTQKSLSLSLGAGGGGSGGGGSGGGGSGGGGSGAPLKIQAYFNETADLPCQFANSQNISLSELVVFWQDQENLVLNEVYLGKEKFDSVHSKYMGRTSFDSDSWTLRLHNLQIKDKGLYQCIIIHKKPTGMIRIHQMNSELSVL

SEQ ID NO: 1011 - protein, 635 aa, synthetic construct
  REGION 1..635: note = LAG3 122-156-sugemalimab antibody heavy chain -CD86 IgV-Q25V/H90V
LDERGRQRGDFSLWLRPARRADAGEYRAAVHLRDRGGGGSGGGGSGGGGSGGGGSGEVQLLESGGGLVQPGGSLRLSCAASGFTFSSYAMSWVRQAPGKGLEWVSGISGSGGFTYYADSVKGRFTISRDNSKNTLYLQMNSLRAEDTAVYYCAKPPRGYNYGPFDYWGQGTLVTVSSASTKGPSVFPLAPCSRSTSESTAALGCLVKDYFPEPVTVSWNSGALTSGVHTFPAVLQSSGLYSLSSVVTVPSSSLGTKTYTCNVDHKPSNTKVDKRVESKYGPPCPPCPAPEFLGGPSVFLFPPKPKDTLMISRTPEVTCVVVDVSQEDPEVQFNWYVDGVEVHNAKTKPREEQFNSTYRVVSVLTVLHQDWLNGKEYKCKVSNKGLPSSIEKTISKAKGQPREPQVYTLPPSQEEMTKNQVSLTCLVKGFYPSDIAVEWESNGQPENNYKTTPPVLDSDGSFFLYSRLTVDKSRWQEGNVFSCSVMHEALHNHYTQKSLSLSLGAGGGGSGGGGSGGGGSGGGGSGAPLKIQAYFNETADLPCQFANSQNVSLSELVVFWQDQENLVLNEVYLGKEKFDSVHSKYMGRTSFDSDSWTLRLHNLQIKDKGLYQCIIVHKKPTGMIRIHQMNSELSVL

SEQ ID NO: 1012 - protein, 635 aa, synthetic construct
  REGION 1..635: note = LAG3 122-156-sugemalimab antibody heavy chain -CD86 IgV-Q25V/H90I
LDERGRQRGDFSLWLRPARRADAGEYRAAVHLRDRGGGGSGGGGSGGGGSGGGGSGEVQLLESGGGLVQPGGSLRLSCAASGFTFSSYAMSWVRQAPGKGLEWVSGISGSGGFTYYADSVKGRFTISRDNSKNTLYLQMNSLRAEDTAVYYCAKPPRGYNYGPFDYWGQGTLVTVSSASTKGPSVFPLAPCSRSTSESTAALGCLVKDYFPEPVTVSWNSGALTSGVHTFPAVLQSSGLYSLSSVVTVPSSSLGTKTYTCNVDHKPSNTKVDKRVESKYGPPCPPCPAPEFLGGPSVFLFPPKPKDTLMISRTPEVTCVVVDVSQEDPEVQFNWYVDGVEVHNAKTKPREEQFNSTYRVVSVLTVLHQDWLNGKEYKCKVSNKGLPSSIEKTISKAKGQPREPQVYTLPPSQEEMTKNQVSLTCLVKGFYPSDIAVEWESNGQPENNYKTTPPVLDSDGSFFLYSRLTVDKSRWQEGNVFSCSVMHEALHNHYTQKSLSLSLGAGGGGSGGGGSGGGGSGGGGSGAPLKIQAYFNETADLPCQFANSQNVSLSELVVFWQDQENLVLNEVYLGKEKFDSVHSKYMGRTSFDSDSWTLRLHNLQIKDKGLYQCIIIHKKPTGMIRIHQMNSELSVL

SEQ ID NO: 1013 - protein, 635 aa, synthetic construct
  REGION 1..635: note = LAG3 122-156-sugemalimab antibody heavy chain -CD86 IgV-Q25F/H90I
LDERGRQRGDFSLWLRPARRADAGEYRAAVHLRDRGGGGSGGGGSGGGGSGGGGSGEVQLLESGGGLVQPGGSLRLSCAASGFTFSSYAMSWVRQAPGKGLEWVSGISGSGGFTYYADSVKGRFTISRDNSKNTLYLQMNSLRAEDTAVYYCAKPPRGYNYGPFDYWGQGTLVTVSSASTKGPSVFPLAPCSRSTSESTAALGCLVKDYFPEPVTVSWNSGALTSGVHTFPAVLQSSGLYSLSSVVTVPSSSLGTKTYTCNVDHKPSNTKVDKRVESKYGPPCPPCPAPEFLGGPSVFLFPPKPKDTLMISRTPEVTCVVVDVSQEDPEVQFNWYVDGVEVHNAKTKPREEQFNSTYRVVSVLTVLHQDWLNGKEYKCKVSNKGLPSSIEKTISKAKGQPREPQVYTLPPSQEEMTKNQVSLTCLVKGFYPSDIAVEWESNGQPENNYKTTPPVLDSDGSFFLYSRLTVDKSRWQEGNVFSCSVMHEALHNHYTQKSLSLSLGAGGGGSGGGGSGGGGSGGGGSGAPLKIQAYFNETADLPCQFANSQNFSLSELVVFWQDQENLVLNEVYLGKEKFDSVHSKYMGRTSFDSDSWTLRLHNLQIKDKGLYQCIIIHKKPTGMIRIHQMNSELSVL

SEQ ID NO: 1014 - protein, 635 aa, synthetic construct
  REGION 1..635: note = LAG3 122-156-sugemalimab antibody heavy chain -CD86 IgV-Q25F/H90V
LDERGRQRGDFSLWLRPARRADAGEYRAAVHLRDRGGGGSGGGGSGGGGSGGGGSGEVQLLESGGGLVQPGGSLRLSCAASGFTFSSYAMSWVRQAPGKGLEWVSGISGSGGFTYYADSVKGRFTISRDNSKNTLYLQMNSLRAEDTAVYYCAKPPRGYNYGPFDYWGQGTLVTVSSASTKGPSVFPLAPCSRSTSESTAALGCLVKDYFPEPVTVSWNSGALTSGVHTFPAVLQSSGLYSLSSVVTVPSSSLGTKTYTCNVDHKPSNTKVDKRVESKYGPPCPPCPAPEFLGGPSVFLFPPKPKDTLMISRTPEVTCVVVDVSQEDPEVQFNWYVDGVEVHNAKTKPREEQFNSTYRVVSVLTVLHQDWLNGKEYKCKVSNKGLPSSIEKTISKAKGQPREPQVYTLPPSQEEMTKNQVSLTCLVKGFYPSDIAVEWESNGQPENNYKTTPPVLDSDGSFFLYSRLTVDKSRWQEGNVFSCSVMHEALHNHYTQKSLSLSLGAGGGGSGGGGSGGGGSGGGGSGAPLKIQAYFNETADLPCQFANSQNFSLSELVVFWQDQENLVLNEVYLGKEKFDSVHSKYMGRTSFDSDSWTLRLHNLQIKDKGLYQCIIVHKKPTGMIRIHQMNSELSVL

SEQ ID NO: 1015 - protein, 635 aa, synthetic construct
  REGION 1..635: note = LAG3 122-156-sugemalimab antibody heavy chain -CD86 IgV-A13F/Q25I/F33L/H90I
LDERGRQRGDFSLWLRPARRADAGEYRAAVHLRDRGGGGSGGGGSGGGGSGGGGSGEVQLLESGGGLVQPGGSLRLSCAASGFTFSSYAMSWVRQAPGKGLEWVSGISGSGGFTYYADSVKGRFTISRDNSKNTLYLQMNSLRAEDTAVYYCAKPPRGYNYGPFDYWGQGTLVTVSSASTKGPSVFPLAPCSRSTSESTAALGCLVKDYFPEPVTVSWNSGALTSGVHTFPAVLQSSGLYSLSSVVTVPSSSLGTKTYTCNVDHKPSNTKVDKRVESKYGPPCPPCPAPEFLGGPSVFLFPPKPKDTLMISRTPEVTCVVVDVSQEDPEVQFNWYVDGVEVHNAKTKPREEQFNSTYRVVSVLTVLHQDWLNGKEYKCKVSNKGLPSSIEKTISKAKGQPREPQVYTLPPSQEEMTKNQVSLTCLVKGFYPSDIAVEWESNGQPENNYKTTPPVLDSDGSFFLYSRLTVDKSRWQEGNVFSCSVMHEALHNHYTQKSLSLSLGAGGGGSGGGGSGGGGSGGGGSGAPLKIQAYFNETFDLPCQFANSQNISLSELVVLWQDQENLVLNEVYLGKEKFDSVHSKYMGRTSFDSDSWTLRLHNLQIKDKGLYQCIIIHKKPTGMIRIHQMNSELSVL

SEQ ID NO: 1016 - protein, 635 aa, synthetic construct
  REGION 1..635: note = LAG3 122-156-sugemalimab antibody heavy chain -CD86 IgV-A13M/Q25I/F33L/H90I
LDERGRQRGDFSLWLRPARRADAGEYRAAVHLRDRGGGGSGGGGSGGGGSGGGGSGEVQLLESGGGLVQPGGSLRLSCAASGFTFSSYAMSWVRQAPGKGLEWVSGISGSGGFTYYADSVKGRFTISRDNSKNTLYLQMNSLRAEDTAVYYCAKPPRGYNYGPFDYWGQGTLVTVSSASTKGPSVFPLAPCSRSTSESTAALGCLVKDYFPEPVTVSWNSGALTSGVHTFPAVLQSSGLYSLSSVVTVPSSSLGTKTYTCNVDHKPSNTKVDKRVESKYGPPCPPCPAPEFLGGPSVFLFPPKPKDTLMISRTPEVTCVVVDVSQEDPEVQFNWYVDGVEVHNAKTKPREEQFNSTYRVVSVLTVLHQDWLNGKEYKCKVSNKGLPSSIEKTISKAKGQPREPQVYTLPPSQEEMTKNQVSLTCLVKGFYPSDIAVEWESNGQPENNYKTTPPVLDSDGSFFLYSRLTVDKSRWQEGNVFSCSVMHEALHNHYTQKSLSLSLGAGGGGSGGGGSGGGGSGGGGSGAPLKIQAYFNETMDLPCQFANSQNISLSELVVLWQDQENLVLNEVYLGKEKFDSVHSKYMGRTSFDSDSWTLRLHNLQIKDKGLYQCIIIHKKPTGMIRIHQMNSELSVL

SEQ ID NO: 1017 - protein, 635 aa, synthetic construct
  REGION 1..635: note = LAG3 122-156-sugemalimab antibody heavy chain -CD86 IgV-Q25A/F33L/H90I
LDERGRQRGDFSLWLRPARRADAGEYRAAVHLRDRGGGGSGGGGSGGGGSGGGGSGEVQLLESGGGLVQPGGSLRLSCAASGFTFSSYAMSWVRQAPGKGLEWVSGISGSGGFTYYADSVKGRFTISRDNSKNTLYLQMNSLRAEDTAVYYCAKPPRGYNYGPFDYWGQGTLVTVSSASTKGPSVFPLAPCSRSTSESTAALGCLVKDYFPEPVTVSWNSGALTSGVHTFPAVLQSSGLYSLSSVVTVPSSSLGTKTYTCNVDHKPSNTKVDKRVESKYGPPCPPCPAPEFLGGPSVFLFPPKPKDTLMISRTPEVTCVVVDVSQEDPEVQFNWYVDGVEVHNAKTKPREEQFNSTYRVVSVLTVLHQDWLNGKEYKCKVSNKGLPSSIEKTISKAKGQPREPQVYTLPPSQEEMTKNQVSLTCLVKGFYPSDIAVEWESNGQPENNYKTTPPVLDSDGSFFLYSRLTVDKSRWQEGNVFSCSVMHEALHNHYTQKSLSLSLGAGGGGSGGGGSGGGGSGGGGSGAPLKIQAYFNETADLPCQFANSQNASLSELVVLWQDQENLVLNEVYLGKEKFDSVHSKYMGRTSFDSDSWTLRLHNLQIKDKGLYQCIIIHKKPTGMIRIHQMNSELSVL

SEQ ID NO: 1018 - protein, 635 aa, synthetic construct
  REGION 1..635: note = LAG3 122-156-sugemalimab antibody heavy chain -CD86 IgV-Q25M/F33L/H90I
LDERGRQRGDFSLWLRPARRADAGEYRAAVHLRDRGGGGSGGGGSGGGGSGGGGSGEVQLLESGGGLVQPGGSLRLSCAASGFTFSSYAMSWVRQAPGKGLEWVSGISGSGGFTYYADSVKGRFTISRDNSKNTLYLQMNSLRAEDTAVYYCAKPPRGYNYGPFDYWGQGTLVTVSSASTKGPSVFPLAPCSRSTSESTAALGCLVKDYFPEPVTVSWNSGALTSGVHTFPAVLQSSGLYSLSSVVTVPSSSLGTKTYTCNVDHKPSNTKVDKRVESKYGPPCPPCPAPEFLGGPSVFLFPPKPKDTLMISRTPEVTCVVVDVSQEDPEVQFNWYVDGVEVHNAKTKPREEQFNSTYRVVSVLTVLHQDWLNGKEYKCKVSNKGLPSSIEKTISKAKGQPREPQVYTLPPSQEEMTKNQVSLTCLVKGFYPSDIAVEWESNGQPENNYKTTPPVLDSDGSFFLYSRLTVDKSRWQEGNVFSCSVMHEALHNHYTQKSLSLSLGAGGGGSGGGGSGGGGSGGGGSGAPLKIQAYFNETADLPCQFANSQNMSLSELVVLWQDQENLVLNEVYLGKEKFDSVHSKYMGRTSFDSDSWTLRLHNLQIKDKGLYQCIIIHKKPTGMIRIHQMNSELSVL

SEQ ID NO: 1019 - protein, 635 aa, synthetic construct
  REGION 1..635: note = LAG3 122-156-sugemalimab antibody heavy chain -CD86 IgV-Q25I/F33M/H90I
LDERGRQRGDFSLWLRPARRADAGEYRAAVHLRDRGGGGSGGGGSGGGGSGGGGSGEVQLLESGGGLVQPGGSLRLSCAASGFTFSSYAMSWVRQAPGKGLEWVSGISGSGGFTYYADSVKGRFTISRDNSKNTLYLQMNSLRAEDTAVYYCAKPPRGYNYGPFDYWGQGTLVTVSSASTKGPSVFPLAPCSRSTSESTAALGCLVKDYFPEPVTVSWNSGALTSGVHTFPAVLQSSGLYSLSSVVTVPSSSLGTKTYTCNVDHKPSNTKVDKRVESKYGPPCPPCPAPEFLGGPSVFLFPPKPKDTLMISRTPEVTCVVVDVSQEDPEVQFNWYVDGVEVHNAKTKPREEQFNSTYRVVSVLTVLHQDWLNGKEYKCKVSNKGLPSSIEKTISKAKGQPREPQVYTLPPSQEEMTKNQVSLTCLVKGFYPSDIAVEWESNGQPENNYKTTPPVLDSDGSFFLYSRLTVDKSRWQEGNVFSCSVMHEALHNHYTQKSLSLSLGAGGGGSGGGGSGGGGSGGGGSGAPLKIQAYFNETADLPCQFANSQNISLSELVVMWQDQENLVLNEVYLGKEKFDSVHSKYMGRTSFDSDSWTLRLHNLQIKDKGLYQCIIIHKKPTGMIRIHQMNSELSVL

SEQ ID NO: 1020 - protein, 635 aa, synthetic construct
  REGION 1..635: note = LAG3 122-156-sugemalimab antibody heavy chain -CD86 IgV-Q25I/F33L/I89V/H90I
LDERGRQRGDFSLWLRPARRADAGEYRAAVHLRDRGGGGSGGGGSGGGGSGGGGSGEVQLLESGGGLVQPGGSLRLSCAASGFTFSSYAMSWVRQAPGKGLEWVSGISGSGGFTYYADSVKGRFTISRDNSKNTLYLQMNSLRAEDTAVYYCAKPPRGYNYGPFDYWGQGTLVTVSSASTKGPSVFPLAPCSRSTSESTAALGCLVKDYFPEPVTVSWNSGALTSGVHTFPAVLQSSGLYSLSSVVTVPSSSLGTKTYTCNVDHKPSNTKVDKRVESKYGPPCPPCPAPEFLGGPSVFLFPPKPKDTLMISRTPEVTCVVVDVSQEDPEVQFNWYVDGVEVHNAKTKPREEQFNSTYRVVSVLTVLHQDWLNGKEYKCKVSNKGLPSSIEKTISKAKGQPREPQVYTLPPSQEEMTKNQVSLTCLVKGFYPSDIAVEWESNGQPENNYKTTPPVLDSDGSFFLYSRLTVDKSRWQEGNVFSCSVMHEALHNHYTQKSLSLSLGAGGGGSGGGGSGGGGSGGGGSGAPLKIQAYFNETADLPCQFANSQNISLSELVVLWQDQENLVLNEVYLGKEKFDSVHSKYMGRTSFDSDSWTLRLHNLQIKDKGLYQCIVIHKKPTGMIRIHQMNSELSVL

SEQ ID NO: 1021 - protein, 635 aa, synthetic construct
  REGION 1..635: note = LAG3 122-156-sugemalimab antibody heavy chain -CD86 IgV-Q25I/F33L/I89F/H90I
LDERGRQRGDFSLWLRPARRADAGEYRAAVHLRDRGGGGSGGGGSGGGGSGGGGSGEVQLLESGGGLVQPGGSLRLSCAASGFTFSSYAMSWVRQAPGKGLEWVSGISGSGGFTYYADSVKGRFTISRDNSKNTLYLQMNSLRAEDTAVYYCAKPPRGYNYGPFDYWGQGTLVTVSSASTKGPSVFPLAPCSRSTSESTAALGCLVKDYFPEPVTVSWNSGALTSGVHTFPAVLQSSGLYSLSSVVTVPSSSLGTKTYTCNVDHKPSNTKVDKRVESKYGPPCPPCPAPEFLGGPSVFLFPPKPKDTLMISRTPEVTCVVVDVSQEDPEVQFNWYVDGVEVHNAKTKPREEQFNSTYRVVSVLTVLHQDWLNGKEYKCKVSNKGLPSSIEKTISKAKGQPREPQVYTLPPSQEEMTKNQVSLTCLVKGFYPSDIAVEWESNGQPENNYKTTPPVLDSDGSFFLYSRLTVDKSRWQEGNVFSCSVMHEALHNHYTQKSLSLSLGAGGGGSGGGGSGGGGSGGGGSGAPLKIQAYFNETADLPCQFANSQNISLSELVVLWQDQENLVLNEVYLGKEKFDSVHSKYMGRTSFDSDSWTLRLHNLQIKDKGLYQCIFIHKKPTGMIRIHQMNSELSVL

SEQ ID NO: 1022 - protein, 635 aa, synthetic construct
  REGION 1..635: note = LAG3 122-156-sugemalimab antibody heavy chain -CD86 IgV-Q25I/F33L/I89M/H90I
LDERGRQRGDFSLWLRPARRADAGEYRAAVHLRDRGGGGSGGGGSGGGGSGGGGSGEVQLLESGGGLVQPGGSLRLSCAASGFTFSSYAMSWVRQAPGKGLEWVSGISGSGGFTYYADSVKGRFTISRDNSKNTLYLQMNSLRAEDTAVYYCAKPPRGYNYGPFDYWGQGTLVTVSSASTKGPSVFPLAPCSRSTSESTAALGCLVKDYFPEPVTVSWNSGALTSGVHTFPAVLQSSGLYSLSSVVTVPSSSLGTKTYTCNVDHKPSNTKVDKRVESKYGPPCPPCPAPEFLGGPSVFLFPPKPKDTLMISRTPEVTCVVVDVSQEDPEVQFNWYVDGVEVHNAKTKPREEQFNSTYRVVSVLTVLHQDWLNGKEYKCKVSNKGLPSSIEKTISKAKGQPREPQVYTLPPSQEEMTKNQVSLTCLVKGFYPSDIAVEWESNGQPENNYKTTPPVLDSDGSFFLYSRLTVDKSRWQEGNVFSCSVMHEALHNHYTQKSLSLSLGAGGGGSGGGGSGGGGSGGGGSGAPLKIQAYFNETADLPCQFANSQNISLSELVVLWQDQENLVLNEVYLGKEKFDSVHSKYMGRTSFDSDSWTLRLHNLQIKDKGLYQCIMIHKKPTGMIRIHQMNSELSVL

SEQ ID NO: 1023 - protein, 635 aa, synthetic construct
  REGION 1..635: note = LAG3 122-156-sugemalimab antibody heavy chain -CD86 IgV-Q25I/F33L/H90M
LDERGRQRGDFSLWLRPARRADAGEYRAAVHLRDRGGGGSGGGGSGGGGSGGGGSGEVQLLESGGGLVQPGGSLRLSCAASGFTFSSYAMSWVRQAPGKGLEWVSGISGSGGFTYYADSVKGRFTISRDNSKNTLYLQMNSLRAEDTAVYYCAKPPRGYNYGPFDYWGQGTLVTVSSASTKGPSVFPLAPCSRSTSESTAALGCLVKDYFPEPVTVSWNSGALTSGVHTFPAVLQSSGLYSLSSVVTVPSSSLGTKTYTCNVDHKPSNTKVDKRVESKYGPPCPPCPAPEFLGGPSVFLFPPKPKDTLMISRTPEVTCVVVDVSQEDPEVQFNWYVDGVEVHNAKTKPREEQFNSTYRVVSVLTVLHQDWLNGKEYKCKVSNKGLPSSIEKTISKAKGQPREPQVYTLPPSQEEMTKNQVSLTCLVKGFYPSDIAVEWESNGQPENNYKTTPPVLDSDGSFFLYSRLTVDKSRWQEGNVFSCSVMHEALHNHYTQKSLSLSLGAGGGGSGGGGSGGGGSGGGGSGAPLKIQAYFNETADLPCQFANSQNISLSELVVLWQDQENLVLNEVYLGKEKFDSVHSKYMGRTSFDSDSWTLRLHNLQIKDKGLYQCIIMHKKPTGMIRIHQMNSELSVL

SEQ ID NO: 1024 - protein, 635 aa, synthetic construct
  REGION 1..635: note = LAG3 122-156-sugemalimab antibody heavy chain -CD86 IgV
LDERGRQRGDFSLWLRPARRADAGEYRAAVHLRDRGGGGSGGGGSGGGGSGGGGSGEVQLLESGGGLVQPGGSLRLSCAASGFTFSSYAMSWVRQAPGKGLEWVSGISGSGGFTYYADSVKGRFTISRDNSKNTLYLQMNSLRAEDTAVYYCAKPPRGYNYGPFDYWGQGTLVTVSSASTKGPSVFPLAPCSRSTSESTAALGCLVKDYFPEPVTVSWNSGALTSGVHTFPAVLQSSGLYSLSSVVTVPSSSLGTKTYTCNVDHKPSNTKVDKRVESKYGPPCPPCPAPEFLGGPSVFLFPPKPKDTLMISRTPEVTCVVVDVSQEDPEVQFNWYVDGVEVHNAKTKPREEQFNSTYRVVSVLTVLHQDWLNGKEYKCKVSNKGLPSSIEKTISKAKGQPREPQVYTLPPSQEEMTKNQVSLTCLVKGFYPSDIAVEWESNGQPENNYKTTPPVLDSDGSFFLYSRLTVDKSRWQEGNVFSCSVMHEALHNHYTQKSLSLSLGAGGGGSGGGGSGGGGSGGGGSGAPLKIQAYFNETADLPCQFANSQNQSLSELVVFWQDQENLVLNEVYLGKEKFDSVHSKYMGRTSFDSDSWTLRLHNLQIKDKGLYQCIIHHKKPTGMIRIHQMNSELSVL

SEQ ID NO: 1025 - DNA, 1359 bp, synthetic construct
  misc_feature 1..1359: note = CD86 ECD-Q25I/F33L/H90I-IgG4 Fc polynucleotide
  source 1..1359: mol_type = other DNA
gcacctctgaagattcaggcctacttcaacgaaaccgctgatttgccatgccagttcgccaacagtcagaacatttctctgtctgagcttgttgtcctgtggcaggaccaggagaacctcgtgcttaacgaagtttacctgggcaaggagaagttcgacagtgtgcacagcaagtacatggggagaactagtttcgactccgactcatggacccttcggctgcataatctccagattaaagataaagggctctatcagtgtatcataattcataagaagccaaccgggatgatcagaatccaccaaatgaactccgaactgagcgttctggctaacttctcccagccagagatcgtaccaatcagcaacataactgagaatgtatatatcaaccttacttgcagttcaattcatggctatccagagcccaaaaagatgagcgtgctcctgcgaaccaagaatagcacgatcgagtacgatggcgtcatgcaaaagtctcaagacaacgttacagaattgtatgatgtcagcatctcactgtccgtgtcattcccagatgtcacttcaaacatgacaatcttctgcatccttgaaacagataagacccgcctgctgtcctcccccttttcaatcgaattggaggatcctcagcctccacccgaccatatcccagaatctaaatatggccctccttgccctagctgtcctgcccccgaatttctgggcggtccctctgtgttcctgtttcctcctaagcctaaagacacactgatgatcagcagaaccccagaggtaacatgcgtggtggtcgatgtgtctcaggaggatccagaggtgcagtttaactggtacgtcgacggcgttgaggtgcataacgcaaagacgaagcctagggaggaacagtttaactcaacatacagggtcgtgtctgtcctcacggtccttcaccaggactggctgaacgggaaggaatacaaatgcaaggtgtccaataagggcttgccatctagcattgaaaagaccatctcaaaggctaaggggcaacctagagagccacaggtatataccctcccccctagccaggaagagatgaccaagaaccaggtatcattgacctgcttggtgaagggattctaccccagcgacatcgccgtcgaatgggaaagtaatgggcagcctgaaaataattacaagacgaccccccctgtcctcgattcagacggctccttctttttgtacagcaggctcaccgtggacaaaagcagatggcaggagggcaatgtcttttcctgtagcgtaatgcacgaggccctgcataaccattatacacagaagtccctgtccctgtctctgggcaag

SEQ ID NO: 1026 - DNA, 1359 bp, synthetic construct
  misc_feature 1..1359: note = CD86 ECD-Q25V/F33L/H90I-IgG4 Fc polynucleotide
  source 1..1359: mol_type = other DNA
gcacccctgaagatacaggcctattttaacgaaactgcggatctgccctgccagttcgccaattcccagaatgtgtcattgtccgagctcgtcgtcctgtggcaggaccaggaaaatcttgttctcaatgaagtgtacctggggaaagagaagtttgatagcgttcatagtaaatatatgggcagaacctccttcgattccgattcctggacgctgaggctgcataacctgcagatcaaagataagggtctgtaccagtgtattatcatacacaaaaagcccaccggcatgatccgcattcatcagatgaatagcgagttgagcgtgctggccaacttcagccagcctgagatcgtgcccattagtaacattaccgagaacgtgtatattaatctcacttgttctagcatacacggatatcccgagcccaagaaaatgtcagtgctgctgaggacaaagaacagcaccatagaatacgacggggtgatgcagaagtctcaggacaacgtaacagagctttacgacgtgagtattagcctgagtgtctccttccctgacgttacgagcaatatgactattttttgcatcctggaaaccgacaagactcgcctgttgagcagtcctttctccattgagctcgaggatccacagccaccacccgaccatatccctgagtcaaagtatgggcccccttgcccgagttgccccgcccccgagtttttggggggccctagcgtgtttttgttccccccaaagcccaaggatactctgatgatctcccgcacaccagaggtgacttgcgtcgtagtggacgtgtcacaggaagacccggaggtgcagttcaactggtacgttgacggcgttgaggttcataacgccaaaactaagccacgcgaggagcagtttaatagcacataccgcgttgtcagcgtcctcaccgtgctgcatcaggactggctgaatggtaaagaatacaaatgcaaagtatcaaataaaggattgccgagcagcattgaaaaaaccatctctaaggcgaagggacagcctagagagccccaggtctatactttgcctccatcccaggaggaaatgaccaagaaccaggtgagcctgacctgtctggtcaaaggcttctacccttccgacatcgcagtggaatgggaatcaaatggccagccagagaataactataaaactacacccccagttctggacagcgacggttcttttttcctgtacagcaggctgactgttgacaagtcacgctggcaggaagggaatgtgttttcatgtagtgtgatgcatgaggcgctccacaatcattatactcaaaagagtttgtctctttcacttggtaaa

SEQ ID NO: 1027 - DNA, 1359 bp, synthetic construct
  misc_feature 1..1359: note = CD86 ECD-Q25I/F33V/H90I-IgG4 Fc polynucleotide
  source 1..1359: mol_type = other DNA
gccccgcttaagattcaagcttattttaacgaaactgccgatctgccatgccagtttgcaaattctcagaacattagcctgagcgaattggtggtggtgtggcaggaccaggagaatctggtccttaatgaggtttacctggggaaggagaaattcgactccgtgcacagtaaatacatgggtaggaccagttttgactcagatagttggacactgcgcctgcacaatctgcagatcaaggataaagggctgtaccaatgcatcattatacataaaaagcctacaggaatgattaggattcaccagatgaactctgagttgtcagtgctggccaatttttcccagcctgaaatagtcccaatatctaatatcacagaaaatgtgtacattaacctcacctgtagctctatccatgggtaccctgagcctaaaaagatgtccgtgttgctgaggaccaagaattccacaatcgaatatgacggcgtgatgcagaagtctcaggataatgttacagaactgtatgatgtgagcattagcctgagcgtcagcttccctgatgtcacaagcaatatgacaattttctgcatcctggaaacagacaaaactagactgctgtcttctcctttcagcattgaactggaggatccccaaccgccccccgaccacattcctgaaagcaaatacgggccaccttgtccaagttgtccggcccctgagttcctgggaggtccctccgtgttcctgttcccccctaagccaaaggacacactgatgatatctaggactcccgaagtaacctgtgtggtcgttgatgtatctcaggaagaccctgaggttcagttcaactggtatgtcgacggtgtggaggtccataatgcaaaaaccaagccccgagaggagcagttcaattctacatatagggtcgtcagcgtcctcacagtcctccaccaggactggctgaacggaaaggagtataaatgcaaagtgagcaataaaggcctcccgagcagcatcgagaagaccatctcaaaagctaagggacagcccagagagccgcaggtttatactctccctccatcccaggaggaaatgacgaaaaatcaagttagcttgacctgcctggttaagggtttttacccctctgatattgccgtggagtgggagagtaacggccagcctgagaacaattataagacaacccctcctgtgttggacagcgatggctccttcttcttgtatagccgcctgactgtggacaagagtcggtggcaggaaggtaacgtcttttcttgcagcgtaatgcacgaagcccttcacaatcattatacacaaaaaagcctgagcctttcactcggcaaa

SEQ ID NO: 1028 - DNA, 1359 bp, synthetic construct
  misc_feature 1..1359: note = CD86 ECD-Q25V/F33V/H90I-IgG4 Fc polynucleotide
  source 1..1359: mol_type = other DNA
gcaccacttaaaatccaggcatatttcaacgaaaccgccgacctgccatgccagttcgctaactctcagaacgtgtctttgagcgaactcgttgtcgtttggcaggaccaagagaatctcgtcctgaacgaggtgtacctcggcaaagaaaagttcgactcagttcactcaaaatatatgggccgcacaagcttcgactcagatagttggacactgaggctgcacaatctccagattaaggacaagggcctgtaccagtgtattatcattcacaagaagcccacgggcatgatcaggatccatcagatgaacagtgaactttcagtcctggctaattttagtcagcccgaaattgtgcccattagcaatatcacagagaatgtgtacattaacctgacttgctcttcaatccatggctaccccgaaccaaagaagatgtcagtgctgctgcggacgaaaaactctacaatcgagtacgacggagtgatgcagaagtctcaggataacgtcacagaactgtacgatgtgtccatctctcttagtgtgagtttccccgatgtcactagcaatatgactatcttctgcatcttggagaccgataagactaggctgctgagctctcccttcagcatcgagctggaggatccccagccacctccagaccatattccagaatccaaatacggccccccatgtccaagctgtcctgcaccagagttcctcgggggtccatctgtctttctttttcccccaaagcccaaggatacccttatgatttctagaacgcctgaggttacctgtgtcgtggttgacgtcagccaggaagaccctgaggtccagttcaattggtatgtagatggggtggaagtgcataatgctaaaacaaagcccagggaggaacaattcaacagcacctatagagtggtgtccgtgcttaccgtactccatcaggactggctgaacgggaaggagtacaagtgtaaggtctccaataaagggctgccaagctccatcgagaaaaccattagcaaggcaaagggccagccaagagagcctcaggtgtatacactgccaccctcccaagaggaaatgaccaagaaccaggtgagcctcacctgcctcgtaaaaggcttttacccaagtgatatcgccgtggagtgggaatccaatggccagcctgaaaataactataagacaacccctcccgtcctggactcagacggctctttcttcttgtattctaggctgactgttgacaagagtagatggcaggaaggaaatgtcttcagttgttctgttatgcatgaggctctgcacaaccattacactcagaagagcttgtccctttccctgggcaaa

SEQ ID NO: 1029 - DNA, 1359 bp, synthetic construct
  misc_feature 1..1359: note = CD86 ECD-Q25I/F33L/H90V-IgG4 Fc polynucleotide
  source 1..1359: mol_type = other DNA
gcccccctgaaaatacaggcctacttcaatgagacagctgaccttccttgtcagttcgccaactcccagaacatatctctgtccgaactggtcgtgctgtggcaggaccaggagaacctggtgctgaatgaggtgtacctgggaaaggagaaatttgatagcgtgcatagcaaatatatgggtaggacctctttcgactccgattcctggacactcaggttgcataatctgcagatcaaagataaaggactgtatcagtgcatcattgtacataaaaagccaaccggtatgatcagaattcaccagatgaactctgaactgtccgtcttggctaacttctctcaacccgagatagttcccatcagcaacataaccgaaaacgtgtacattaacctgacttgtagctccattcacggatatccggagcccaagaaaatgagcgtgctgctccggacaaagaactctactatcgaatacgatggggtaatgcagaagagccaagacaatgtgactgaactctacgacgtaagcatctctctctcagtgagctttcccgacgtgactagtaacatgactattttctgcatcctggagaccgacaagactcgattgctgagctcaccattctcaatcgaattggaagatccgcagcccccacccgaccacatacctgagtccaagtacgggcctccatgtccttcttgcccagcccctgaatttctggggggccccagtgtctttctttttcctcccaagccgaaggacactctcatgatatccagaacacccgaggtaacctgtgtcgtggtggatgttagccaggaagatccggaagtgcagttcaattggtacgtcgatggtgtggaggtgcacaatgcaaagacgaaaccccgcgaagaacagttcaatagcacatatagagtggttagcgttcttactgtgcttcatcaagactggctgaacggaaaggagtacaagtgcaaagtgtctaacaaaggtctgcccagcagtatcgagaaaacaattagcaaggccaaaggtcagcctcgggagccacaggtgtacaccctcccaccgtctcaggaggaaatgactaagaaccaggtgagcctgacatgcctggtgaaaggcttttatccttctgatatagccgtagagtgggaaagcaacgggcagcctgaaaacaactataagacaaccccacccgtcttggactcagacgggtccttttttctctacagccgccttaccgttgacaagtctaggtggcaagagggaaatgtctttagttgttcagttatgcacgaggccctgcacaaccattatacccagaaatcacttagcttgtcattgggcaag

SEQ ID NO: 1030 - DNA, 1359 bp, synthetic construct
  misc_feature 1..1359: note = CD86 ECD-Q25V/F33L/H90V-IgG4 Fc polynucleotide
  source 1..1359: mol_type = other DNA
gccccacttaagatacaagcctattttaatgagaccgcagatctgccttgccagttcgctaatagccagaatgtgtctctgagcgagctggtggtactgtggcaggaccaggaaaaccttgtgctcaatgaggtgtatctcgggaaagaaaaatttgactccgtgcatagtaagtacatgggaaggactagctttgacagcgacagttggacactccggctgcataatctgcagattaaggacaagggcctgtaccagtgtatcatcgtgcataagaagcctaccggcatgatccggatccaccaaatgaactcagaactgtccgtcctcgccaatttctctcagccagaaatcgtgcccattagcaatatcacggaaaacgtgtacattaatcttacatgtagctccatccacggatatccagaaccaaagaaaatgagcgtgttgctgaggacaaagaactctaccattgagtacgatggcgtgatgcagaagtctcaggataatgttacagaactctatgatgtgtctatctctctctcagtgagctttccagatgtgaccagcaatatgaccatcttttgtattctggaaaccgacaagacaagattgctgagctcccccttttccatagaactcgaagacccccagccgccccctgatcatatccccgagtcaaagtatgggcctccatgtccctcttgccccgcacctgagtttttggggggcccaagcgtgttcctctttccgcctaagccaaaagataccttgatgatctctcgcaccccagaagtgacttgtgtggtggtggacgtatcccaggaggacccggaggtgcagttcaactggtatgttgatggggtggaagtccataatgccaagactaaaccgcgcgaggaacagttcaactccacctaccgcgtagtatccgttctcaccgtgctgcatcaggattggctgaatgggaaggagtacaaatgtaaggtcagtaacaaaggactgccctcttccatagagaaaacgatctcaaaggcaaagggccagcctcgcgaaccacaggtgtataccctgcccccaagccaagaggagatgaccaaaaatcaggtctctctcacttgtttggtgaagggattctacccctcagacatcgccgtggagtgggagtcaaatggacagcctgagaacaattataagacgactccaccagtgctggattccgatggatctttttttctgtattctaggctgacggtggacaagtccaggtggcaggagggtaacgtgttttcatgcagtgtgatgcacgaagccctccataaccactacactcaaaagtccttgagcttgagtctggggaag

SEQ ID NO: 1031 - DNA, 1359 bp, synthetic construct
  misc_feature 1..1359: note = CD86 ECD-Q25I/F33V/H90V-IgG4 Fc polynucleotide
  source 1..1359: mol_type = other DNA
gctcctctgaagatccaggcctactttaatgaaaccgctgatttgccctgtcagttcgcaaactctcagaacatcagcttgagtgaactcgtggttgtgtggcaggatcaggagaacctggtgctcaatgaagtctatctcggcaaggagaagtttgattctgtccactcaaagtacatggggcggactagctttgattctgattcatggactctgaggctgcacaacctccaaataaaagacaaagggctctaccaatgcattattgtacataaaaagcctactggcatgatcaggatacaccaaatgaattcagagctgagcgtgctggcgaatttttcccagccagaaatcgtgccaatatctaacattaccgagaacgtctacatcaatctcacctgtagcagcatacatggatacccagagccaaagaaaatgtctgtcctgctgcggacaaagaactccaccatcgaatatgacggcgttatgcaaaaatctcaggataatgtcactgaactgtacgacgtgagcatctccttgtcagtatcattccccgatgtgactagcaacatgaccattttttgtatcctggaaacagataaaacaaggctgctgagcagccctttctccatcgaattggaggacccccagcctccgcccgatcatattccagagtccaagtacggccccccctgcccttcctgccccgcaccagaatttctcgggggcccaagcgtgttcctctttccacctaagcccaaggatacactgatgattagcaggaccccggaggtgacttgtgtggtcgtggacgtgtcccaggaggatccagaggtccagttcaactggtacgtagatggcgttgaagtgcacaatgccaagacgaagccccgcgaagagcagttcaactccacataccgcgtggtatcagtgctcaccgtgctgcaccaggattggctgaatggcaaggagtacaaatgcaaggtgtccaacaaaggacttccatccagcatcgagaaaacaatttccaaggcaaagggccagccacgggagcctcaggtttacaccctgccgcccagccaagaggagatgaccaagaaccaggtcagtctgacgtgtctggtgaaaggcttctatccctctgatattgctgtagagtgggagtctaatgggcagcctgagaataattacaaaacaactccacctgtgctggacagcgacgggagcttctttctctatagccggctgacagtcgataaaagcagatggcaggaggggaacgtcttttcttgcagtgtgatgcacgaggcactgcacaatcattatactcagaagagcctgagcctcagcctgggaaag

SEQ ID NO: 1032 - DNA, 1359 bp, synthetic construct
  misc_feature 1..1359: note = CD86 ECD-Q25V/F33V/H90V-IgG4 Fc polynucleotide
  source 1..1359: mol_type = other DNA
gcccccctgaaaatccaggcatacttcaacgagacagctgatctgccttgtcaattcgctaactctcaaaatgtgtctctctccgaactggttgtggtatggcaagatcaggagaacctggtgctgaatgaggtgtatctggggaaggagaaattcgattcagtgcattccaaatatatggggcggactagcttcgattccgactcttggaccctgcgactccataacctgcaaatcaaagataagggcctgtaccagtgcatcatcgtccacaaaaaacccaccggaatgatcaggatccaccagatgaactccgaattgagcgtcttggctaatttctcacagcctgaaattgtgcctatcagcaacattacagaaaacgtctacatcaacctgacatgctccagcatccacggctaccctgaacccaagaagatgtcagtgttgcttcggaccaaaaacagtacaatcgaatatgacggcgtcatgcagaaatcacaggataacgtaaccgaactgtacgacgtttccatcagcctctctgttagctttccagacgttacatcaaacatgaccatcttctgtattctcgaaaccgataaaacccgcctgctgtcatctccattttcaatagagctcgaggatccacaacccccccctgaccacattccagaatcaaagtacggccctccctgtccatcctgtcctgctcctgagttcctgggaggacccagcgttttcttgttcccccccaaaccgaaagacacccttatgatctccagaacccccgaggttacctgcgtggttgtcgacgtgtcccaggaggatcctgaggtgcagttcaattggtacgtggacggcgtcgaagttcataacgccaagaccaagccgagagaagaacagtttaacagcacatacagagtcgtaagtgtgctgacagtgcttcatcaggactggctgaatggaaaagagtacaagtgtaaagtcagtaacaagggcctgccatcctccatcgaaaagacaatttctaaagctaagggacagccccgggagccacaggtttacacactgccgccctctcaggaagagatgaccaagaatcaggtttccctgacatgcctggtaaaaggtttttatcccagcgatattgcggtggaatgggaaagcaatggtcagccagaaaataactacaaaacaacccctcctgtcctggactccgacggatcatttttcttgtactcccgcttgaccgtggataaatccaggtggcaggaaggcaatgttttcagttgctcagtcatgcacgaagcccttcacaaccactatacccaaaagtcactctcactctcattgggaaag

SEQ ID NO: 1033 - DNA, 1359 bp, synthetic construct
  misc_feature 1..1359: note = CD86 ECD-A13L/Q25I/F33L/H90I-IgG4 Fc polynucleotide
  source 1..1359: mol_type = other DNA
gcccccctcaaaatccaggcttacttcaatgagactctggacctgccatgccagttcgcaaattcacagaatatcagcctgagcgagctggtagtgctttggcaggatcaggagaatcttgtgctgaacgaagtatatctgggcaaagagaagttcgacagcgtgcacagcaagtatatgggccgcacaagctttgatagcgatagctggacacttcggctgcacaatctgcagatcaaggacaaagggctctaccaatgtatcatcatccacaagaaacccaccggaatgatacggattcaccagatgaatagtgagctgtccgtccttgccaactttagccagccagaaatcgtccccatttctaatattacagagaacgtttatataaatcttacctgtagcagcatccacgggtaccctgagccgaaaaagatgtctgtgcttctgaggacaaagaattccacaattgagtacgatggtgtaatgcagaaatcccaagataacgtcaccgagctttacgatgtgagcatcagtttgagcgtgtcttttccagatgtcacttcaaatatgactatattctgtattcttgagacggacaaaacgcgcctgctgagcagccctttcagcattgagctggaagatccacagccacctcctgaccacatccctgaaagcaagtacggacctccatgtccttcttgccccgccccagaatttctgggggggccatctgtgttcctcttcccccccaagcccaaagatacactcatgatctctaggacacccgaagtgacgtgtgtcgttgtggatgtgagccaggaggatcccgaggtgcagttcaactggtacgtggacggcgttgaggtgcacaacgcaaaaacgaagccccgcgaagaacagttcaattcaacctatagggtggtgagcgtgctgactgtgctccaccaagattggttgaacgggaaagaatacaagtgcaaggtatctaataaaggcttgccctcctctatcgaaaaaactataagcaaggctaaaggacagcctcgcgagccacaagtgtatacacttccaccgtcacaggaagagatgactaagaaccaggtatctcttacctgcctggtaaaggggttctacccatcagatatcgccgtcgagtgggaaagtaatggacagcctgagaacaactataaaacaacccctcccgtgctcgattccgacgggagcttcttcctttactccaggctcaccgtagataaatctcgatggcaggaggggaatgtgttctcatgctctgtgatgcacgaggccttgcataaccactacacccagaaatcactgtcactgagcctgggtaag

SEQ ID NO: 1034 - DNA, 1359 bp, synthetic construct
  misc_feature 1..1359: note = CD86 ECD-A13I/Q25I/F33L/H90I-IgG4 Fc polynucleotide
  source 1..1359: mol_type = other DNA
gcccccctcaagatccaagcatatttcaacgaaactatagacttgccctgtcagtttgccaattcccaaaacatctccctttccgaactggtggtgctttggcaggatcaggaaaacctcgtgctgaatgaggtgtacctcggtaaggagaaattcgacagtgtgcactccaagtacatggggcgaacaagctttgacagcgatagctggacgctgagactccacaatctgcagatcaaggacaaagggctgtatcagtgcatcattatccacaaaaagcctaccggaatgatcaggattcaccagatgaacagtgaactgtcagtgctggcaaatttcagccagccagagatcgtgcctataagcaatatcacagaaaacgtctatatcaatctgacctgctcctccatccacggctaccctgaacctaaaaagatgtctgttctgcttcggacaaagaacagcactatcgagtacgacggggtgatgcagaaaagccaagacaatgttaccgaactgtacgatgtttccatctctctgtctgtttcttttcctgacgtgacatccaacatgacaatcttttgcattttggagactgataagacacgccttctctcctctcccttctctatcgagctcgaagatccacagccacctcccgatcacatacccgagagcaagtatggccctccttgtccctcctgcccagcccccgaatttctgggggggccatccgtgtttctcttccctcccaaaccgaaggacaccttgatgatcagcagaactcccgaggtaacctgtgtggtagttgatgtttctcaagaggatccagaggttcaattcaattggtatgtcgatggggtagaagtgcacaacgccaaaaccaagccaagggaggagcaattcaatagcacataccgggtggttagcgttttgaccgtgctgcaccaagactggttgaacggtaaagagtacaagtgtaaagtgagcaacaaaggactgcccagcagcattgagaaaacaatcagtaaggccaaggggcaaccccgagaaccgcaggtctataccctgcccccgagccaagaggaaatgaccaaaaaccaggtgtccctcacatgcctggtgaaagggttttacccgagcgacatagccgtggagtgggaatccaacgggcagcctgagaacaactacaagactactcctccagtgcttgacagtgatggatccttcttcttgtactcaaggctgaccgtggacaagtccagatggcaggagggcaatgtcttcagttgctcagttatgcatgaggccctgcacaaccattatacacagaaaagtcttagtttgtctctggggaaa

SEQ ID NO: 1035 - DNA, 1359 bp, synthetic construct
  misc_feature 1..1359: note = CD86 ECD-A13L/Q25V/F33L/H90I-IgG4 Fc polynucleotide
  source 1..1359: mol_type = other DNA
gctcccttgaagatccaggcctacttcaatgaaacgctcgatctgccgtgccagtttgcaaacagccagaatgtctccctcagtgagctggtggtcctctggcaagaccaggagaaccttgtcttgaacgaggtctacttgggaaaggagaaattcgacagcgtccattctaaatacatggggaggacttccttcgatagtgactcatggacattgaggctgcacaacttgcagatcaaggataagggactgtatcagtgcatcatcatccataaaaagcctaccggcatgataagaatacatcagatgaatagtgaactcagtgttctggctaacttcagccaacccgagatcgttccaattagcaatataacagagaatgtgtacatcaacctgacgtgtagcagcatccacggctatcccgagcccaaaaaaatgtctgtgctcctcaggacaaaaaacagcactattgaatacgacggggtgatgcagaaaagtcaggataatgtgactgagctctacgatgtctctatcagcctgtccgtttccttcccagacgtgacctctaatatgacaattttctgcattttggagaccgataaaacaaggctgctttcttctccattctctatcgagttggaagatccccagccaccacctgaccatatccccgaatccaaatatggccccccttgcccgtcttgtcccgccccagaatttttggggggcccatccgtcttcctcttcccacctaagcctaaggacacattgatgatttctcggacaccagaagtgacctgtgtggtggtggacgtcagccaggaggaccctgaagttcagtttaactggtacgtggacggcgttgaggttcacaacgcaaagaccaaacctagagaggaacaatttaactccacatatcgcgttgtgagcgtcctgacagtactgcaccaggattggcttaacggcaaggagtacaaatgtaaagtgtctaacaaagggctccccagctccatcgagaaaacaatatcaaaagccaaaggacaacctagagaaccacaggtgtatactctcccaccctcacaagaagagatgactaagaaccaagtgtctctcacatgcctggttaaaggattctaccccagtgatatcgccgtggaatgggagtctaatggtcaacctgagaacaactacaagacgactccaccagtgttggatagcgacggcagtttctttctttacagccggctgaccgtagacaaaagtcggtggcaagaggggaacgtgttcagttgctcagttatgcacgaggcattgcacaatcactacacacagaagtctctgagtctgagtctcgggaag

SEQ ID NO: 1036 - DNA, 1359 bp, synthetic construct
  misc_feature 1..1359: note = CD86 ECD-A13I/Q25V/F33L/H90I-IgG4 Fc polynucleotide
  source 1..1359: mol_type = other DNA
gctcctctgaaaattcaggcctattttaatgagaccatcgatctgccttgtcagtttgccaactcccagaatgtcagcttgtccgaactggtcgtgctttggcaagatcaggagaatcttgtgctgaatgaggtgtaccttggcaaggaaaagttcgacagcgttcactccaagtacatggggcggacaagtttcgacagtgattcatggaccctgaggctgcacaatctgcaaattaaggataaggggttgtatcagtgtatcataattcacaaaaaacccacaggaatgattagaatccatcagatgaattccgagttgagcgttctggcaaatttcagccagccagaaatcgtgccaattagcaacataacagaaaatgtctacattaacctgacatgctcctcaatacatgggtatcctgagcctaagaagatgtcagtgctgctgcgcacgaaaaattccacaattgagtatgatggggttatgcaaaaatcccaggacaatgtgacagagctgtatgacgtgtccattagcctctccgtcagctttccagacgtgacatccaacatgaccatcttctgcatcctcgaaacagacaagactcgcctgctctcttccccgttttctattgagctggaagacccacagccacctccagatcatatacctgagagtaaatacggcccaccctgtccgtcctgccctgccccagagtttcttggggggccctctgtattcctctttccccccaagcccaaggatactctgatgatctcacggactcctgaggtgacttgcgtggtcgtcgatgtgtcccaggaggacccggaggtccagttcaactggtatgtggacggggttgaggtccacaatgctaagaccaagcccagggaggaacagtttaactctacctacagagtggtgagcgtgcttacagtgttgcaccaggattggctgaatgggaaggaatataagtgcaaggtctctaataaaggcctcccaagttcaatcgaaaaaaccatttctaaggccaaaggacagccccgagaacctcaagtgtacactctcccacctagtcaggaggaaatgaccaagaaccaggtaagtttgacatgcctggtcaagggattttatcctagcgatatcgccgtagagtgggaatccaacggccaacccgagaacaattataagacaacaccccctgttctcgacagtgacgggtctttcttcctgtattctcggctgacggttgacaagagccggtggcaggaagggaatgtgttttcatgtagtgtcatgcacgaggccctgcataaccattatacccagaagagcttgagccttagcctggggaag

SEQ ID NO: 1037 - DNA, 1359 bp, synthetic construct
  misc_feature 1..1359: note = CD86 ECD-Q25I/F33L/I89L/H90I-IgG4 Fc polynucleotide
  source 1..1359: mol_type = other DNA
gcaccgctgaaaattcaagcttattttaatgagactgcagatctgccctgtcagttcgcaaattctcaaaacataagcctcagtgagctggtggtgctgtggcaggaccaggaaaatctggtgctgaatgaagtgtatctgggaaaggagaagtttgatagtgtccactctaagtacatggggcgcacttcatttgactctgattcatggactctgaggcttcataacctccaaataaaggacaaggggctgtaccagtgcatcttgatccacaagaagcccactggcatgattcgaattcatcagatgaattccgagctgtccgtgctggccaatttttctcagccagagatcgtccctatttctaatatcacggagaacgtgtacattaatctgacgtgctcaagtatccacggctatcctgaacccaagaagatgagtgtgctgctgaggacaaaaaattccactattgagtacgacggtgtgatgcaaaaaagtcaggacaatgtcaccgaactgtatgacgtgtccatctctttgtctgtgagcttcccagatgtgacctccaacatgacaattttctgtattctcgaaaccgacaaaactagacttctgagtagtcccttctccatcgagctcgaggatcctcagccccccccagaccatatcccagagtctaaatatgggcctccctgccctagctgccccgcgcctgaatttcttggcgggccgtctgttttcctgttcccccccaagcccaaagacacacttatgatctctcgcaccccagaggtcacctgcgttgtcgtagacgtatcccaagaagacccagaggtccagttcaactggtacgtggacggcgtcgaggtgcataatgccaagacaaagccacgggaagagcagttcaactctacatatcgggtggtctccgtgcttactgtcctgcaccaagattggcttaacggcaaggagtataaatgtaaagtgagtaataaaggtctgcccagcagcattgagaaaaccatctccaaagcgaaaggccagccacgggagcctcaggtttacaccctcccccctagtcaggaggaaatgacaaaaaatcaggttagcctcacatgtctggtgaagggtttttatcctagcgacattgccgtggagtgggagagcaacggccagccagaaaataattacaaaactacacctcccgtgctggattctgatggatctttctttctctacagcagactgacagtggataagtcccggtggcaggaagggaacgtcttttcctgctccgtcatgcatgaggcactgcacaatcactatacccagaagagcctgagtctgagcctcggtaag

SEQ ID NO: 1038 - DNA, 1359 bp, synthetic construct
  misc_feature 1..1359: note = CD86 ECD-Q25I/F33L/M60R/H90I-IgG4 Fc polynucleotide
  source 1..1359: mol_type = other DNA
gctccgctgaagatccaggcttactttaacgaaactgctgacttgccatgtcaattcgccaattctcagaacatatcactgagcgaactggtcgttctttggcaggatcaggagaaccttgtcctgaacgaggtgtacctggggaaagagaagttcgatagcgtgcacagtaaatatcgcggtcgaacctcattcgacagtgactcctggacattgcgcctgcataacctgcagatcaaggacaaaggactgtatcagtgcattatcatccataaaaaaccaaccggtatgatacgcatccaccagatgaattcagaattgagcgtgttggctaactttagccagccggagatcgtgccaataagcaacatcactgagaatgtctatataaacctcacatgctctagtattcatggctatccggagcctaagaagatgtccgtgctgctccgcactaaaaactcaactatcgagtacgacggagtgatgcaaaagtctcaggacaatgtgacagagctgtacgacgtgagtatttccctgagcgtctcatttcctgatgtcaccagcaacatgaccatcttctgcatccttgagactgacaagacccgcctgctgagttcacctttctccatagagctcgaagacccgcagcccccccctgaccacatccctgagagtaaatacggtccgccctgcccttcctgccccgcccccgagttccttggcggccctagcgtttttctgttccccccaaagcctaaagacaccctgatgatttcaagaacaccggaggtgacctgtgtggtggtggacgttagtcaagaggacccggaagtgcagtttaattggtacgtggatggcgtggaggtccacaatgccaaaacgaagccacgagaggagcagttcaattcaacctatcgagtggtcagcgtgctgacggtgctccatcaggattggttgaacgggaaagaatacaaatgcaaggtctctaataaggggctcccatctagtatcgagaaaactatttctaaggctaagggtcagcctcgggaaccacaggtatacacactgccaccttctcaggaggaaatgactaagaatcaagtgtctttgacttgtttggtcaagggattttacccttcagacatcgctgtcgagtgggagagcaacgggcaacccgaaaacaactataaaacaactccccccgtcctggacagcgacgggtcttttttcctgtattcaaggcttactgtggacaagtcccgctggcaggagggtaatgtgttcagttgcagcgtgatgcatgaagccttgcataatcactatacccagaagagtctgtcactgtccctgggcaag

SEQ ID NO: 1039 - DNA, 1359 bp, synthetic construct
  misc_feature 1..1359: note = CD86 ECD-Q25V/F33L/I89L/H90I-IgG4 Fc polynucleotide
  source 1..1359: mol_type = other DNA
gctcctctcaagatccaagcatactttaacgagaccgccgacctgccgtgccagtttgctaatagtcagaacgtgtctctgagcgaacttgtcgttctttggcaggatcaggagaacctggtcctgaatgaggtttacctggggaaggagaagtttgactccgtgcattcaaagtacatggggcgaaccagtttcgattctgatagttggactctccgactccacaacctgcaaatcaaggataaggggctgtatcagtgtatactcattcacaagaagccgactggcatgataagaatccaccagatgaatagcgaactgagtgtgctcgcgaacttttctcagccggagattgttcccatctctaatatcaccgaaaatgtgtatatcaacctgacctgcagttctattcacggctatcctgaaccaaaaaaaatgagtgtgctcctgcggacaaaaaatagtacgatcgagtatgatggagttatgcagaagtcccaggataatgtgaccgaactctatgacgtgtccatcagcctctccgtgtctttccccgacgttactagcaacatgaccatcttttgcattctggaaaccgacaaaacacggctgctgtcctctccattttctatcgagctcgaagatccacagccgccccccgatcatattcccgagagcaagtacggacccccgtgtcccagctgccctgcccccgagttcctcggcggccccagtgtgttcctgtttccccctaagcctaaagatactcttatgatatcccggactcccgaagttacctgcgttgtggttgacgtttcccaagaagaccctgaggtccagtttaactggtatgtagatggagtcgaggtgcacaacgccaagacgaagccgagagaggaacagttcaatagcacatacagggtggtttcagtactcactgtgctccatcaagattggctgaacgggaaggaatataagtgtaaggtgtctaacaaagggctcccatcatcaattgaaaaaactatcagcaaagccaagggccagcctcgggagcctcaggtgtatacactgccacctagccaggaagagatgacaaaaaaccaggtgagcctgacctgcctcgtgaagggattctatccttccgatattgcagtggaatgggaaagcaacggacagcctgaaaacaattataaaaccaccccccctgtgttggatagcgacggcagcttcttcttgtattcaagactcaccgttgataagtctcggtggcaggagggaaatgtgttttcctgctcagtgatgcacgaggccctgcacaaccattacacgcaaaagagtctgagcctgtcactgggaaaa

SEQ ID NO: 1040 - DNA, 1359 bp, synthetic construct
  misc_feature 1..1359: note = CD86 ECD-Q25V/F33L/M60R/H90I-IgG4 Fc polynucleotide
  source 1..1359: mol_type = other DNA
gctccattgaagatccaggcttacttcaatgagaccgctgacctgccgtgccagttcgcaaatagccagaatgtgtccctttctgagctcgtggtgctttggcaggatcaggagaacctcgtcctgaacgaagtgtatctgggcaaggaaaagtttgattcagtgcattccaaatacaggggtcgcacctcctttgatagcgattcttggaccttgcgcttgcataacctccagataaaagacaagggcctctatcagtgtatcattatccacaaaaagccaacaggtatgattagaattcaccaaatgaactctgaactgtctgtgcttgcaaatttcagtcagccggagattgttccaatttctaatatcacagagaatgtatatattaatctgacctgctctagtatccatggttatccggaaccgaagaaaatgtccgtgctgctgcgaaccaaaaacagtaccatcgagtacgacggcgttatgcagaagtcccaggataatgtcactgagctgtacgacgtatcaatcagtctctctgtgtcatttcctgatgtcacctcaaacatgaccattttctgtatcttggaaacggacaaaacgaggcttctgtcctcccccttttccattgaactggaggatccacagcctcctccggaccacattcccgagagtaaatacggtcccccgtgcccctcatgcccagccccggagttcctgggcggaccaagcgttttcctcttcccccccaagcccaaggatactctgatgatcagcaggacccccgaggtgacctgtgtggtcgtggacgtgtcccaagaggatcccgaagtccagttcaattggtacgtcgacggggtagaagtgcacaatgctaagaccaaaccccgagaggagcaattcaacagcacatacagggttgtctccgttctcaccgttttgcatcaggactggctgaacggcaaggagtacaaatgcaaggtaagtaacaaaggcctcccatctagcattgaaaagacgatttctaaggccaaggggcagccccgcgagcctcaggtgtacaccctgcctccttcccaggaggagatgaccaagaatcaggtgagtttgacatgcttggtgaagggtttttatccatccgacatcgctgtcgagtgggaaagtaacgggcagcccgagaacaactataaaacaacccctcctgttctggactcagacggtagcttcttcctgtatagccgactgaccgtggataaatcacgctggcaagagggcaacgtgttcagctgtagtgtcatgcatgaggccctccacaatcattatacacagaaaagcctgagtctctctctcggaaaa

SEQ ID NO: 1041 - DNA, 1359 bp, synthetic construct
  misc_feature 1..1359: note = CD86 ECD-Q25F/F33L/H90I-IgG4 Fc polynucleotide
  source 1..1359: mol_type = other DNA
gccccccttaaaatccaggcttatttcaacgaaactgctgacttgccttgccaattcgccaatagtcagaatttcagcctgtccgagcttgtggtcctgtggcaggatcaggagaacctggtcctcaacgaggtgtatctggggaaagaaaagtttgattcagtgcattcaaaatacatgggaaggacaagctttgattctgactcctggacgctgcgcttgcacaacctgcaaattaaggacaaaggcctctaccagtgcatcattattcacaagaagccaaccggtatgatcagaatacatcagatgaatagcgaactttctgtgcttgcaaatttctcccagcccgagatcgtgccaatcagtaacatcacagagaacgtgtatattaacctgacctgctctagcattcacggttatccagagccaaagaagatgtccgtgcttctgaggaccaagaactcaacaattgagtacgatggcgtgatgcagaaaagccaggacaacgtgacagaactctatgatgtatccatctctcttagcgtctccttcccagatgtgacctcaaatatgaccattttttgcatcctggagaccgacaagacccggttgctcagcagcccttttagcatcgaactggaggaccctcagcctcctccagaccacattcccgagtcaaagtacgggcctccttgcccatcttgtcctgcccccgagtttctggggggccctagcgtcttcctgttcccccccaaaccaaaggacaccctcatgatctccagaactccggaagtcacttgcgtggttgttgatgtgtcccaggaggacccagaagtgcagtttaattggtacgtagatggggtggaggtgcacaatgcaaagaccaagccacgagaagaacaatttaattcaacttatagggtcgtttctgtcctgacggttttgcatcaggactggctcaacggcaaggaatacaagtgcaaggtaagcaacaaaggacttccgagctctatcgagaagacgatctctaaggccaaggggcagcctagggagccacaggtctacaccctccctccatctcaggaggaaatgaccaagaaccaagtgagtctgacatgccttgtgaaaggcttctacccatcagacatcgcagtcgagtgggagtccaacggccagcccgagaataattacaagacgactcctcccgtgttggatagcgatggttcctttttcctgtactccagattgacggtggacaagagccggtggcaggagggcaatgtgttcagctgcagcgttatgcacgaggccctgcacaaccattacacacagaagtcacttagcctgagcctcggtaaa

SEQ ID NO: 1042 - DNA, 1359 bp, synthetic construct
  misc_feature 1..1359: note = CD86 ECD-Q25I/F33L/H90F-IgG4 Fc polynucleotide
  source 1..1359: mol_type = other DNA
gcccctctcaaaattcaggcttattttaatgagaccgccgaccttccttgccagtttgctaatagccagaatatctccctgtccgagctggtggttctctggcaagatcaagaaaacctcgttctgaatgaggtttatctgggaaaagaaaagtttgacagtgtgcacagcaaatacatgggaaggacatcctttgattctgacagctggacccttcgccttcacaatctgcagatcaaggataagggactgtatcagtgtatcatttttcacaaaaagcctaccggcatgattcggattcatcagatgaactctgagctgagtgtcctggccaatttctcacagcctgagattgtgcctatatccaacatcactgagaacgtgtatatcaacctgacatgctctagcattcatggataccccgaacccaaaaagatgtccgtgctcctgaggactaagaactcaactattgagtacgatggggttatgcaaaagagccaagacaacgtgactgagctgtacgacgtgagcatttccctgtccgtaagtttccccgacgtgacttctaatatgactatcttctgtatattggagacagataagactcggctgctttcaagtcctttctccattgagctggaagatccacagcctccccctgatcatataccagaaagcaagtacggcccaccgtgtccatcctgcccagcccccgagttcttgggaggtccatccgtttttctgttcccccctaagccaaaagacacactgatgatcagcagaacacccgaagttacgtgtgtcgtcgtcgacgtgtcacaggaggatcctgaagtgcagttcaactggtacgtggacggcgttgaggtgcacaacgccaaaacgaaacctcgggaagagcagtttaatagtacctaccgcgtggtctcagttctgaccgtgctgcatcaagactggctgaatggcaaagagtacaagtgcaaggttagtaacaagggcctcccaagcagcattgagaagaccatttccaaggctaagggccagcccagggagccgcaggtgtacacattgccccctagccaggaagaaatgactaagaaccaggtgtccctgacgtgccttgtcaagggattctatccctctgacatcgccgttgagtgggaaagtaatggccaaccagagaataattacaagactactcctcccgtgctcgatagcgatggaagtttttttttgtattccaggctcactgttgataaatcacggtggcaggaaggcaacgttttttcctgctctgtgatgcatgaagcgctgcacaaccactacacacagaaaagcctttctctgtctcttggtaaa

SEQ ID NO: 1043 - DNA, 1359 bp, synthetic construct
  misc_feature 1..1359: note = CD86 ECD-Q25I/F33A/H90I-IgG4 Fc polynucleotide
  source 1..1359: mol_type = other DNA
gcacctctcaagattcaggcctactttaacgagacggcagatctgccctgccagtttgccaattctcaaaatatcagtctgagcgagctcgtggtggcctggcaggatcaggaaaaccttgtcctcaacgaggtgtacctcggaaaggagaaatttgacagcgtgcactccaaatatatgggccgaacgagcttcgactcagactcttggactcttaggctccacaatctgcagattaaggacaaggggctctatcagtgcattattatccacaaaaagcctacaggcatgattaggatccaccagatgaattcagaactgtcagtcctggcaaacttttctcagccagagattgttccaatatctaacataaccgaaaacgtctacatcaacttgacgtgtagctctattcatggataccccgagccaaagaaaatgagcgtgttgcttagaaccaagaactccacaattgagtacgatggggtgatgcagaaatcacaggataatgtcaccgaactgtacgatgtctccataagcctgtccgtgagttttcctgatgtgacgtccaatatgacgatcttttgcattcttgaaaccgacaagacacggttgttgtcctcccctttctcaatcgaactggaggatccccagcctccccctgatcacatccctgagtccaagtatggacctccctgccctagctgcccagctccagagtttcttggcggccctagtgtgtttctcttcccaccgaagcccaaggacacactcatgattagcaggactcctgaagtcacttgtgtggtggtggacgttagtcaagaggatcccgaggtacaatttaactggtacgttgatggcgtcgaggtgcataacgctaagaccaagcctcgcgaagagcagttcaatagcacttaccgggtggtctccgtgctgactgtactccatcaggactggttgaacggtaaggaatataagtgcaaggtgtcaaacaagggcctgcctagcagtattgagaagacaatcagcaaggccaagggacaacctcgagaacctcaagtctacaccctgcccccttctcaagaggaaatgaccaagaatcaggtgagcctgacctgtctcgtcaagggcttctatcctagtgatattgcggtggagtgggagagcaacgggcagccagagaacaattataaaaccacacctcctgtcctggactccgacggctctttcttcttgtattctcggctgaccgttgacaagtcaaggtggcaggagggaaatgtctttagttgtagtgtgatgcatgaagccctgcataaccattacactcagaagtcacttagtttgagcctcggcaaa

SEQ ID NO: 1044 - DNA, 1359 bp, synthetic construct
  misc_feature 1..1359: note = CD86 ECD-Q25I/H90I-IgG4 Fc polynucleotide
  source 1..1359: mol_type = other DNA
gctccccttaagatccaggcctacttcaacgaaacagccgatctcccgtgccagtttgcaaattcccagaatatatcactgtctgagctggtcgtattctggcaggatcaggaaaaccttgtccttaatgaggtctatctggggaaagagaagtttgacagcgttcatagcaaatatatgggacgaacaagctttgacagcgattcatggacactcaggctgcataatttgcagattaaagacaagggcctgtaccagtgtattattattcacaagaagcctacaggcatgattcgaatccaccagatgaactccgaactcagcgtcctggccaacttctcccaacctgagatcgtgccaatttccaacatcactgaaaacgtgtatatcaatcttacttgtagttctattcacgggtatcctgagcccaaaaagatgtctgttctcctgaggaccaagaactccactattgagtacgacggcgttatgcagaagagccaggacaacgttacagagctgtacgacgtctccatcagtctgtctgttagcttccctgatgtgaccagcaacatgaccattttttgtattttggaaaccgataagactcggctgctgtctagccccttcagtattgagctggaggatcctcagcctccacctgaccacatcccagagagcaaatatggccctccttgcccaagctgccctgctccggagttcctgggaggcccgtcagtgttcctttttcctcccaagccaaaagacactctgatgatttccagaacccccgaggttacttgtgtagtcgtggacgtgtcccaagaagaccccgaggttcagttcaattggtacgttgacggggtggaggtccacaatgctaagaccaagccccgcgaagagcagtttaacagcacttatcgggttgtttctgttttgacagtcttgcatcaggattggctgaacggaaaagagtataagtgcaaagtgagtaataagggactcccaagcagcattgagaaaacaatttccaaggctaagggtcagccccgcgagcctcaggtgtacacactgccaccctcccaggaggagatgactaaaaaccaggtgtctctcacttgcctggttaaggggttctatccatctgacatcgccgtcgaatgggagtcaaatggacagcctgaaaacaattacaaaacaacaccacctgtgctggactccgatggctcattttttctgtactctcggctcaccgtggacaagtccaggtggcaagagggcaatgtgtttagctgcagcgtgatgcatgaagcactgcacaatcattacacacaaaagtctctgagtctgtcccttggcaag

SEQ ID NO: 1045 - DNA, 1359 bp, synthetic construct
  misc_feature 1..1359: note = CD86 ECD-Q25V/H90V-IgG4 Fc polynucleotide
  source 1..1359: mol_type = other DNA
gcccctttgaagatacaggcctacttcaatgaaactgcggatctgccttgccagttcgctaatagccagaacgtttccctgagcgagctggtcgtgttctggcaggatcaggagaatcttgttctgaatgaagtttatctggggaaggagaaattcgatagcgtccacagtaaatatatgggacgcacctccttcgactcagacagctggactttgaggctgcacaatcttcagatcaaagataagggactgtaccagtgtattatcgtacataagaaacccacaggcatgatccggatacaccagatgaattccgaactgtccgtgctggccaacttttctcagcccgagattgttcctatctccaacataactgaaaacgtatacatcaatctgacatgcagctccatccacggttatccagagccaaagaaaatgtctgtgctgctgagaaccaaaaatagcactatcgaatatgacggagtaatgcagaagtctcaggacaacgtcaccgagctgtatgatgtgagcatctctctgagcgtgtcctttcccgatgtgacttccaacatgaccatcttttgtattctcgaaaccgacaagacccggctgctgagttcaccattcagcatcgaacttgaagatccccagccgcctcccgaccacattcccgagtccaagtacgggccaccatgccccagctgtccagcgcccgagttcttgggcgggccaagcgtgttcctgttccctcctaaacccaaagacacactgatgatatcccgcacgcctgaggtcacatgtgtcgtggtggatgtgagccaggaggatcctgaggtgcaattcaactggtatgtggacggtgtggaggtgcacaacgccaaaaccaaacctcgggaagaacagtttaatagtacgtacagggtcgtgagtgtgctgacggttttgcatcaggactggctcaatggcaaggagtacaaatgtaaggtatccaataagggactgccgagctccattgaaaaaactatttcaaaggccaagggacaacccagggagccccaggtgtacacactgccaccaagccaagaagaaatgacaaagaatcaggtgtctctcacttgtctcgtgaaagggttttatcccagcgacatcgcagttgaatgggaatctaacggccagccagagaacaactataagaccactcctcctgtgctggacagcgacggcagttttttcctctattccagacttacggttgacaagtctaggtggcaggagggaaacgtcttcagttgtagcgtgatgcacgaagccctccataaccattacacccaaaagtccctttctctgtccctgggtaaa

SEQ ID NO: 1046 - DNA, 1359 bp, synthetic construct
  misc_feature 1..1359: note = CD86 ECD-Q25V/H90I-IgG4 Fc polynucleotide
  source 1..1359: mol_type = other DNA
gcccctttgaagattcaagcctactttaacgaaaccgccgacctcccatgccagtttgccaacagccagaacgtgtctctcagcgagcttgtggtgttttggcaggatcaggagaacctcgtgctcaacgaagtgtacctgggcaaagaaaagttcgatagtgtacattccaagtacatgggcagaacctcttttgactctgacagttggactctgaggctccataatctgcagatcaaggacaaaggcctgtaccagtgtatcataatacataaaaagcccactgggatgattagaattcaccagatgaattccgaactgtcagtgttggccaatttttcccaacctgagatcgtgcccatctctaacattaccgaaaatgtatacatcaacctgacttgctcctcaatccacgggtaccccgaacccaagaaaatgtccgtactgctgcggaccaagaactcaaccattgaatatgatggcgttatgcaaaagagccaagacaatgtcaccgaactctacgatgtaagtattagcctgtcagtttctttccccgacgtgacctctaacatgacaatattctgtatcctggaaacggataaaacgaggctgctgtcatcccccttcagtatcgaactggaagacccgcaacccccacccgatcatattcccgagtccaaatatggacctccatgtcccagttgcccagcaccagagttcttgggtggtccatctgtgttcttgtttcccccaaagcctaaggataccctgatgatttcccggacacccgaggtcacttgtgtggtagtggatgttagtcaggaggacccagaggtgcaattcaactggtatgtggatggggtggaagtgcacaatgctaaaaccaaaccacgcgaggaacagtttaattccacttatcgggtggtttctgtgctcaccgtgcttcatcaggactggctcaatggaaaagaatataagtgcaaggtgtccaacaaaggcctgcccagtagcatcgagaaaaccatctctaaggccaaaggacagccacgcgagcctcaggtctatacacttccccccagccaggaggagatgacgaagaaccaggtctctcttacatgtctcgtcaaaggcttctaccccagtgacatagccgtggagtgggagtctaacggacagcctgaaaacaattacaaaacaacccctccagtgctcgatagcgacgggtcattctttctttacagtaggctgacggtcgataagtctaggtggcaggaaggcaatgtgttttcctgtagtgttatgcatgaggccctgcacaatcactacacacagaagtccctctctctgtcattgggcaag

SEQ ID NO: 1047 - DNA, 1359 bp, synthetic construct
  misc_feature 1..1359: note = CD86 ECD-Q25F/H90I-IgG4 Fc polynucleotide
  source 1..1359: mol_type = other DNA
gcacccctgaagattcaggcctattttaatgagacagccgacttgccatgtcagttcgccaattcccagaatttttctcttagcgagctcgtggtcttttggcaggatcaggagaatcttgtgctgaacgaagtgtacctcggcaaagagaaattcgattccgtgcactccaagtacatggggaggactagcttcgattctgactcttggaccctgcggctccataacctccagattaaggacaaggggctgtaccagtgtatcatcattcataagaaacccacaggcatgatacgaatccaccagatgaacagtgaactgagcgtgctggctaactttagccagcctgagattgtccctattagtaatataacggaaaacgtctatatcaatctgacctgttccagtatccacgggtaccccgagcctaagaagatgtctgtgctgctgcggaccaagaactctaccatcgaatatgacggtgtgatgcagaagagccaggataacgtgaccgagttgtatgacgtgtctatcagcctgtccgtgtcatttccggatgtgacaagcaatatgaccattttctgcatcctggagacagacaaaactagacttctgagtagccccttcagtatcgaactcgaagaccctcagccacccccagatcatataccggaaagtaaatatgggccaccatgcccatcctgcccagctcccgaatttcttggaggaccatctgttttcctttttccccctaaaccaaaagataccctgatgatctctagaactcccgaggtgacatgcgttgtcgtggacgtgtctcaggaagaccctgaagttcagtttaattggtacgtggatggggtcgaagtgcacaatgcaaagaccaaacctagagaggaacagttcaacagcacatacagagtggtgtccgtgcttaccgtcttgcatcaggattggctcaatggtaaggagtataagtgcaaagtctctaataaagggctgccgagctctattgagaagacaatctcaaaggcaaagggccagcctcgagaaccgcaggtgtatactctgcctcctagccaggaggagatgacgaagaaccaggtctcactgacctgcctggtaaaaggattttaccctagcgatatcgccgtcgagtgggagagcaacggccaaccagaaaataattataaaaccaccccaccagtactggattctgatggcagcttctttctgtacagcagattgacggtggataagtctagatggcaggagggaaacgttttttcatgctccgtgatgcacgaagccctccataaccattacactcaaaagtcattgagtctgtccctcggaaaa

SEQ ID NO: 1048 - DNA, 1359 bp, synthetic construct
  misc_feature 1..1359: note = CD86 ECD-Q25F/H90V-IgG4 Fc polynucleotide
  source 1..1359: mol_type = other DNA
gcgccgctgaagatacaggcttacttcaatgaaaccgcagacttgccctgccagtttgccaacagccagaacttctctctgtcagaattggtggtgttctggcaggaccaggaaaacctggtcctcaacgaggtgtatcttggaaaagagaagtttgattccgtgcactccaaatatatggggaggacaagcttcgatagtgattcatggaccctccgactgcacaaccttcagatcaaggataaaggcctgtatcagtgtatcattgtgcacaagaagcccaccggaatgatacggatccaccagatgaatagcgagctctccgtgctggccaacttcagccagcccgagatcgtccctatcagcaacattaccgagaatgtgtacattaacctgacttgctcatcaatccatggctatcccgaaccgaaaaagatgagtgtgttgctgagaactaagaactctacaattgaatacgatggggtaatgcaaaagtcccaagacaacgtgacagagctgtacgatgtgagcatcagcctcagtgtgagcttcccagacgtgacctccaacatgacaatcttctgcattctggaaacggacaaaacccgactgctttcctctcctttttcaatcgagctggaggacccccagcctcctcccgatcacatcccagagagcaagtatgggcctccctgtcccagctgccccgcccctgaattcctgggaggccctagcgtgtttctgttccctccgaaaccaaaagatacgttgatgatatctagaacccccgaagttacgtgcgtggtcgtggacgtgtcacaagaggacccagaagtgcagttcaattggtacgtagacggtgtggaggtacacaacgccaagacaaagccaagagaagagcagtttaattctacttaccgcgtggtgtcagtccttacagtccttcaccaggattggctgaacggaaaggagtacaagtgtaaggtttctaataaggggctgccctcttctatagaaaagacaatatctaaggcaaagggtcagccgcgagaaccacaagtctacaccctgcccccaagccaggaagaaatgacaaaaaatcaggtcagtctcacttgcttggttaaaggcttctatcccagtgatatcgcagtggagtgggaatctaacggccagcctgagaacaactataaaaccacccctcctgtgctcgacagcgatgggtccttttttctgtactcccgcctgactgtggataagtcacgctggcaggaaggtaacgtgttttcctgtagcgtgatgcatgaggcccttcacaatcactacactcagaaaagtctcagcctgtccttggggaag

SEQ ID NO: 1049 - DNA, 1359 bp, synthetic construct
  misc_feature 1..1359: note = CD86 ECD-A13F/Q25I/F33L/H90I-IgG4 Fc polynucleotide
  source 1..1359: mol_type = other DNA
gcccctctgaagatccaagcctatttcaacgagacctttgacctgccgtgccaattcgccaactctcagaatatctcattgtccgagctggtggtattgtggcaggatcaggagaaccttgtcttgaatgaagtatatctgggaaaagagaagttcgatagtgtccattcaaagtacatgggtaggacctctttcgacagcgattcttggaccctccggctgcataacctccagatcaaggacaaaggactgtaccagtgtataatcattcataagaagccaacaggaatgatcaggatccaccaaatgaacagcgaactgagtgtgttggctaacttctcccagcccgagattgtccccatcagtaatataaccgaaaatgtgtacataaacctgacttgctccagcattcatggataccctgaacctaagaagatgtcagtgctcctgcgcacgaaaaactcaaccatagagtacgacggagtcatgcagaagagtcaggataacgtcactgaactgtacgatgtgtcaatctccctgagcgtgtcattccccgacgtgacaagcaatatgactatcttttgcattctggagacagacaaaacaagactcctttctagcccgttctcaatcgagctggaagacccccaacctcctcccgaccacatcccggagtctaagtacggacctccctgtccttcttgccctgcacccgaattcctgggcggacctagcgttttcctcttcccccccaagccaaaggatacactgatgatttctcggacacccgaggttacctgcgtggtcgtggacgtctcacaggaggacccagaggttcagtttaactggtacgtggatggcgtggaggtgcacaatgccaagacaaagcccagggaggagcagttcaatagcacgtacagagtggtgagcgtgctcacagtgttgcaccaggattggctcaacgggaaggaatacaaatgtaaggtgtccaacaagggccttccttccagtatcgagaaaactatctcaaaggccaagggccagcctagagagccccaggtgtacaccctgcccccttcacaggaagaaatgactaagaatcaggtctccctgacttgtctggtgaagggcttctatccaagtgacatagccgttgaatgggaatctaatgggcagccagagaacaactacaagacaactccacctgtccttgattctgatggcagtttctttctgtattctaggctgactgtggataaatcacgatggcaagagggtaacgtcttctcctgcagcgtaatgcacgaagcccttcacaaccactacacacagaaaagcttgtccctcagccttgggaag

SEQ ID NO: 1050 - DNA, 1359 bp, synthetic construct
  misc_feature 1..1359: note = CD86 ECD-A13M/Q25I/F33L/H90I-IgG4 Fc polynucleotide
  source 1..1359: mol_type = other DNA
gctcccttgaagatccaggcatatttcaatgagacgatggacctgccatgccagtttgctaactcccagaatatctcactcagcgaactggtggtgctgtggcaggaccaggaaaatctggtgctgaatgaagtgtatctgggcaaggagaagttcgacagtgtgcatagcaaatatatggggaggacttccttcgatagtgactcctggactttgaggttgcacaatctgcagatcaaggacaaggggctgtaccagtgtattatcatccataagaaaccaacaggtatgattcggatacaccagatgaacagcgagctgagcgtgcttgcaaatttctcccagcccgaaatcgtcccaatatctaatataaccgagaacgtgtacatcaaccttacctgttcctccatacacggatatcccgagcctaaaaaaatgtcagtgctgttgcgcaccaagaatagcacaattgagtatgatggcgtcatgcagaaaagccaagataacgtgaccgaactgtacgacgtcagtatcagcctgtctgtgtcctttcccgacgtgactagtaatatgacaatcttctgtatacttgagacagataagacaaggctgctgtccagcccgttctcaatcgagctggaggatccacaacccccccctgaccatatcccagaaagtaaatatggaccaccttgcccaagttgtcccgcccctgagttcctggggggcccgtccgtgttcctgttcccacccaagcccaaggacaccctgatgatctctaggacaccggaggtcacctgcgtggtggtggatgtgtcccaggaggaccctgaggtgcagttcaattggtacgtagatggcgtcgaagtgcacaacgcaaagactaagccccgcgaagagcagtttaacagcacctaccgcgtcgtctccgtgctgacggttctccaccaagattggttgaacggcaaggagtacaaatgcaaagtctccaataaaggactcccgtcttccatagagaagactatttcaaaggcaaagggccaacctcgcgagccccaagtgtatactctgccacccagtcaagaggaaatgaccaaaaatcaggtgagcctgacctgcctggttaaggggttttacccctccgacattgccgtggagtgggagagtaatggtcaaccagagaataactataagactaccccacctgttttggattctgatggctctttttttctttatagccggttgaccgtagataaaagccgatggcaggagggcaacgtctttagttgcagcgtgatgcacgaggctttgcacaatcattacacccagaaatctctttctctgtcacttggaaaa

SEQ ID NO: 1051 - DNA, 1359 bp, synthetic construct
  misc_feature 1..1359: note = CD86 ECD-Q25A/F33L/H90I-IgG4 Fc polynucleotide
  source 1..1359: mol_type = other DNA
gcccccctgaaaattcaggcctactttaatgaaaccgcagacctgccctgtcagttcgctaactcacagaacgcctccttgagcgagctggtggtcctgtggcaggatcaggaaaaccttgtccttaacgaggtgtacctgggcaaagaaaaattcgactctgtgcactccaaatatatgggaaggactagcttcgatagcgactcttggacattgcggctgcataacctgcagattaaggataagggcttgtaccaatgtattatcattcacaagaaaccaactggcatgattaggatacaccaaatgaactctgagctgtccgtgctggcgaattttagccagccggagattgtaccaatttctaatatcaccgaaaacgtctatataaatctgacttgcagcagcatacacggataccctgagcctaaaaaaatgtcagtgctgctgcgcacaaagaactccaccatagaatacgatggcgtgatgcagaagtctcaggataatgtgaccgagctgtacgatgtgtccatctcactgtctgtatcttttcccgatgtgacatccaacatgacaatcttttgcatcctcgagacagacaaaacacggctgctgtcctctccctttagcatagagctcgaagaccctcaacctccaccagatcatatacccgagagtaagtacgggcccccctgcccaagctgcccggccccagagtttctcggcggccccagcgtgtttctgttcccccctaaacctaaggatactcttatgatatcacggactcctgaagtgacatgcgtcgtggttgacgtgtcacaggaagatcccgaagtgcagtttaactggtatgtggacggagtcgaagtgcataatgccaaaaccaagcctagggaagagcagtttaacagtacatatcgcgtggtctcagtgctgactgtgctgcatcaggactggctcaatgggaaagagtataagtgcaaagtttcaaacaaaggactgccaagttctatcgaaaagacaatcagcaaagccaagggtcagcccagagaacctcaagtttatacattgcccccttcacaggaggaaatgacaaagaaccaggtctccctcacatgcttggttaagggattttacccttctgatattgccgtggagtgggagtccaatggacagcccgagaacaactacaaaactacccctcctgtgctcgactcagacggtagtttttttttgtactctaggctcacagtggataagtccagatggcaggaggggaacgtcttctcctgctccgtgatgcacgaggcactccataaccactacactcagaaaagcctctccctctctctgggcaaa

SEQ ID NO: 1052 - DNA, 1359 bp, synthetic construct
  misc_feature 1..1359: note = CD86 ECD-Q25M/F33L/H90I-IgG4 Fc polynucleotide
  source 1..1359: mol_type = other DNA
gctccattgaagattcaggcctattttaatgaaacagcagacctgccttgccagtttgcaaatagccagaacatgagcttgagcgagctggttgtgctgtggcaagaccaggaaaatcttgtgcttaatgaggtttaccttgggaaagagaaattcgatagcgtgcactccaaatacatgggaaggacatcctttgactccgacagctggactttgcgcctgcataacctgcaaatcaaggataaagggctgtatcaatgtataatcatccacaaaaagcccaccggcatgattaggatacatcagatgaactccgaactctctgtactggctaacttcagtcagcctgaaatcgtccctatatcaaacattaccgagaatgtgtacataaaccttacctgcagctccattcacggatatcctgaacccaaaaagatgagtgtgcttctcaggaccaagaattcaaccatagagtatgacggggtgatgcagaaaagccaagataacgtgacagagctttatgacgtctccatctcactctctgtgtctttccctgatgtgacatctaatatgaccattttctgcatcctggaaaccgacaagaccagacttctctccagccctttctctattgaacttgaagatccacaacctccacctgatcatatcccagagagtaagtacggaccgccttgcccatcttgtccagccccagaatttctgggcggcccctccgtgttcctgttccctcctaagcctaaagataccctgatgatctccagaactcccgaggttacttgcgtggttgtggatgtctcccaggaggatccggaggtgcagttcaattggtacgtggatggcgtggaagtgcacaatgctaaaacaaaaccccgcgaagagcagttcaatagtacctatcgagtcgtttcagtcctgaccgtgctgcaccaggactggttgaacggcaaagagtataaatgcaaagtgtcaaataaggggctcccctccagcattgagaagaccatcagtaaggccaagggacagccgcgcgagccccaggtgtatactctgcccccctcccaggaagagatgaccaaaaatcaggtgtctctgacttgtcttgtaaaaggattttatccatccgacattgccgtggaatgggagagcaatggacaacccgagaacaattacaagacaaccccccctgtcttggatagcgacggcagcttcttcctgtatagccggctcacggtcgacaagtcccgctggcaggaaggcaatgtgttcagctgcagcgtgatgcacgaggcactgcataaccattacactcagaaatctctttcactcagcctgggcaaa

SEQ ID NO: 1053 - DNA, 1359 bp, synthetic construct
  misc_feature 1..1359: note = CD86 ECD-Q25I/F33M/H90I-IgG4 Fc polynucleotide
  source 1..1359: mol_type = other DNA
gctcctctgaagatccaggcatatttcaacgagactgcggatttgccttgtcagttcgccaacagtcagaacatttccctgtcagagctcgtggtgatgtggcaagaccaggaaaatctcgtcctgaatgaagtctatctgggaaaggagaaattcgactccgtccacagcaagtacatgggcaggacctcatttgactctgatagttggacactgaggctgcacaatcttcagatcaaggacaaggggctgtatcaatgtatcatcattcacaagaagcccacaggcatgattagaattcatcagatgaattccgagttgtccgtactggcaaacttcagccagccagagattgtgcccatcagtaacatcacagagaacgtttatatcaaccttacctgttcttccatacacggctaccccgaacctaaaaagatgagtgtcctgcttaggactaaaaattccaccatcgagtacgatggcgtgatgcagaagtcccaggataatgtgaccgagctgtacgatgtgagtatcagcctgagcgtgagttttccagacgtgacgtcaaatatgacgattttctgcattttggaaaccgataagacccgcctgctgagtagtccattttccattgagctggaggaccctcagccaccgcctgaccatattcctgagtctaaatacggcccaccctgcccaagctgtccagcgcccgagttcctgggagggccttccgttttcctctttcctcccaagccaaaggataccctgatgatcagcaggacgccagaggtaacatgtgtagtagtggacgtgtcacaggaggatccagaggttcagttcaactggtacgtggatggcgtggaagtgcataacgccaagactaaaccacgcgaggagcaatttaactccacatatcgggtcgttagcgtcctcaccgtgctgcaccaggactggctcaacggcaaagagtataaatgcaaagtctctaataagggcctgcctagctccattgagaaaacaatcagcaaggcaaagggacaaccaagggagccacaggtgtacacgctgcccccctctcaggaggaaatgaccaagaaccaggtgagcctcacatgcctggtcaagggattttatcccagtgacatcgctgtggagtgggaaagcaatggtcagccagaaaacaactacaagactacgccgccagtgcttgattctgacgggtccttcttcctgtatagtagacttacagtcgacaaatctcggtggcaagaggggaatgtattcagttgttccgttatgcacgaggctctgcataaccattatacgcagaagtccctctcactgtccctgggcaag

SEQ ID NO: 1054 - DNA, 1359 bp, synthetic construct
  misc_feature 1..1359: note = CD86 ECD-Q25I/F33L/I89V/H90I-IgG4 Fc polynucleotide
  source 1..1359: mol_type = other DNA
gcgcccctgaagattcaggcctattttaatgaaactgctgatctgccttgccagtttgccaatagtcagaatattagcctctccgaactggtggtgctgtggcaggaccaagaaaatctggtgttgaatgaggtttatctcggtaaggagaaatttgactcagtgcactccaagtatatgggccggacaagtttcgactctgactcttggactctgcgcctccacaatctccagatcaaggataagggactgtatcagtgtattgtcattcataagaaaccaaccggaatgattcgcatccaccagatgaattccgagctgtctgtcctggccaattttagccaaccagaaatcgtgcccatctccaacatcaccgaaaacgtgtatattaatctgacctgtagctctatacacgggtacccggagccaaagaagatgagcgttttgctcagaacgaagaactccacgattgaatacgacggagtcatgcagaagtcccaggataacgtgacagagctttatgacgtgtccatctctctgagcgtgagttttcccgacgttacctcaaatatgaccatcttctgcatccttgaaaccgacaaaacacggctcttgagttcccctttttccattgagctggaagacccccagcccccacctgaccacatccccgagtccaagtatggacccccctgcccatcttgtcccgctcccgaatttttgggcggcccctcagtttttctgtttccaccgaagccaaaggatactctcatgatcagtaggactccggaagtgacctgtgttgtggtggacgtcagccaggaagatccggaagtgcagttcaattggtatgtggacggggtggaagtgcataacgctaagacaaaaccgcgcgaagaacaatttaattccacatacagggtggtgtccgtgttgactgttctgcatcaggactggctcaatggcaaagagtacaaatgcaaagtgagcaacaagggcctcccctcctcaatcgaaaagaccatctccaaagcgaaaggacagccaagagagccacaggtctacaccctgcccccatcccaggaggaaatgaccaagaatcaggtctctctcacttgcttggtaaagggcttttatccttccgatattgcagtggaatgggagagtaacgggcaacccgagaataactataaaaccaccccacccgtgctcgattcagatggctctttttttctgtactcccgcctgaccgtggataagtccaggtggcaggagggaaatgtgtttagctgttctgtcatgcatgaggccctgcacaaccactatactcaaaagtctctgagtcttagtttgggcaag

SEQ ID NO: 1055 - DNA, 1359 bp, synthetic construct
  misc_feature 1..1359: note = CD86 ECD-Q25I/F33L/I89F/H90I-IgG4 Fc polynucleotide
  source 1..1359: mol_type = other DNA
gctcctctgaagattcaggcatactttaatgagaccgcagacttgccatgtcagttcgccaatagccagaacatctcactgagcgagttggttgttctctggcaggaccaggaaaatctggtccttaacgaggtgtatttgggcaaggagaagttcgacagcgtgcacagcaaatacatgggaaggactagctttgactccgactcatggactcttcgcctgcataacctgcagatcaaagacaagggcttgtaccaatgcatctttattcacaagaaacccaccggcatgattcggatacaccagatgaactcagagctgagcgtgctcgccaatttcagccagcctgaaatcgtgccgattagtaacattaccgagaatgtgtacattaacttgacgtgctcatccattcacggatatcctgaacccaagaaaatgtctgtgctgctgaggaccaagaatagcaccatcgagtatgatggggttatgcagaagtcccaggataacgttacagagctgtacgatgtctcaatcagcttgagcgtctccttcccagacgtgactagcaacatgactatcttctgcatcctggaaacagataaaactcgactgctgtcctcccccttttccatcgagctggaagacccacagccacctccagatcatatcccagaatctaaatatggcccaccgtgtccctcttgtccagctccagagtttctggggggaccaagcgtgtttctcttccccccgaaaccaaaggatactcttatgatctcaagaacccccgaggttacctgcgttgtagtggacgtgtcccaagaagacccagaagtccaatttaactggtacgttgacggggttgaggtacacaacgcaaaaaccaagccacgcgaggagcagttcaatagcacctatagggtggtctccgtcctgacagtacttcatcaagactggctgaacggaaaggagtacaagtgtaaagtgtccaataaagggctcccctctagcatagaaaaaaccatcagcaaggccaaggggcaacccagggaaccgcaagtgtacacgctgccaccatctcaggaggaaatgacaaagaaccaggtgtcactgacctgtctcgttaagggattttacccctctgacatcgccgtggagtgggagagcaacggacaacccgagaataactataagactactccaccagtgctggattccgacggcagtttcttcctgtattctcgcctgactgtggataagtccaggtggcaggagggcaatgttttctcttgcagcgtcatgcatgaggccctgcacaatcactacactcagaagagcctctctctttccctgggcaag

SEQ ID NO: 1056 - DNA, 1359 bp, synthetic construct
  misc_feature 1..1359: note = CD86 ECD-Q25I/F33L/I89M/H90I-IgG4 Fc polynucleotide
  source 1..1359: mol_type = other DNA
gcccctctcaagatccaggcctatttcaatgaaacggccgatctcccctgccaattcgctaacagccagaacatctcactgtctgaattggtggtcctgtggcaggatcaggagaacctggttttgaacgaggtctatctgggaaaagagaagtttgatagtgtgcatagcaagtacatgggacggacatccttcgactccgactcctggacactccgcctccacaacctgcagataaaagacaagggtctgtatcagtgcattatgatccataagaagccaaccggaatgatcaggatccaccagatgaatagcgagttgtccgttctggctaatttttctcagcctgaaatcgtgcctatctccaatatcactgagaacgtgtatatcaatttgacgtgctcttctatccatggataccccgaacccaagaaaatgagtgtcctgctcagaacaaagaattctaccatagagtatgacggagtgatgcagaaaagtcaagacaatgtgaccgagctgtacgatgttagcattagcctctcagtgtcctttccagacgtcacaagcaatatgaccatcttctgcatcctcgagaccgacaaaacacggctgctttcaagccccttttcaattgagctggaggacccgcagcctccgcctgaccacatccccgagtccaagtatggtccaccatgccccagttgtcctgccccagagtttttgggagggccaagcgtttttcttttccctcccaagccaaaggacaccttgatgatctctcggacccccgaggttacatgcgttgttgtggacgtgagccaggaggatccagaggtccagtttaattggtacgtggacggagtagaagtccacaacgccaaaactaaacctagagaagagcagtttaactcaacgtacagggtggtgagtgtcctgacagtgttgcaccaagattggctgaacggcaaggaatacaaatgcaaggtgagtaacaagggccttccctctagtatcgaaaagaccatcagtaaagcgaagggccagccacgggaacctcaggtgtataccctgcccccatcccaggaggagatgacaaaaaatcaggtatctcttacgtgtctggtaaaggggttttacccctccgacatcgctgtcgagtgggagtccaatggccagcctgagaataactacaaaactacgccacctgtcttggattcagatgggagtttcttcctgtactcccgcctgacagtggataaaagccgctggcaggaggggaatgtgttctcctgttcagtgatgcacgaagcgctccacaatcattatacccagaaatccctgtccctgtcacttggaaaa

SEQ ID NO: 1057 - DNA, 1359 bp, synthetic construct
  misc_feature 1..1359: note = CD86 ECD-Q25I/F33L/H90M-IgG4 Fc polynucleotide
  source 1..1359: mol_type = other DNA
gcgcccttgaagattcaggcatattttaacgagacagctgatttgccctgtcagtttgctaactcccaaaacatttccctttctgagttggtggttctgtggcaggatcaggagaacttggtgctgaacgaggtgtaccttggcaaggagaaattcgactcagtgcattccaagtacatgggtaggacatctttcgacagtgactcctggacactccggttgcataacctccagattaaggataaaggcttgtaccagtgtattattatgcataagaagcccacaggtatgattagaattcaccagatgaatagtgagctcagcgtgcttgccaacttttctcagccggaaatcgtcccaatctcaaatatcactgaaaacgtgtacataaatctgacttgctcttctatacacggttatccagagcccaagaagatgagcgtgctcttgaggaccaagaattccacaatagagtatgatggagtcatgcagaagagccaggacaacgtcacagaactgtacgatgtaagtatttcattgagcgtgagcttccctgacgtgacatcaaacatgactatcttctgtattctcgaaacggataagacaagactgctctccagtcctttttccatcgaactcgaggatccgcagcccccacctgaccacataccagagagtaaatatggtccgccttgccccagttgtccagcgcccgaattcctgggtggcccatccgtgtttctcttccctcccaaacccaaggatactttgatgatctcaaggacaccagaggtgacttgtgtcgtggtggacgtgtctcaggaagatcctgaggtccagttcaactggtacgtggacggggtggaggtgcacaacgctaagaccaaaccacgggaggagcagttcaattccacataccgggtcgtgagcgttctgactgttctccaccaggattggctcaacggcaaagaatacaagtgcaaagtctccaataagggtttgcccagctctattgagaagaccatttctaaggccaagggccagccaagggaaccacaggtgtatacactgccccctagtcaggaggagatgaccaaaaatcaggtgtcacttacttgcctggttaaggggttctatcctagcgatattgctgtcgagtgggaaagcaacggacagccagagaacaattataagacaactcctcctgtcctggatagcgatggctcattctttctgtatagccggctgaccgtcgacaaaagtcggtggcaagagggcaatgtgttctcatgttccgttatgcatgaggccctgcacaatcattatacccagaaaagtctgtccctgagcctggggaaa

SEQ ID NO: 1058 - DNA, 1359 bp, synthetic construct
  misc_feature 1..1359: note = CD86 ECD-IgG4 Fc polynucleotide
  source 1..1359: mol_type = other DNA
gctcccctgaaaatccaggcatatttcaacgagaccgctgacctcccttgccagttcgccaattcccagaaccaatccctttccgagcttgtggtgttttggcaggaccaggagaatctggttctgaacgaggtgtatctcggaaaagaaaaatttgacagtgtgcacagcaagtatatggggcggacgagtttcgactccgattcttggaccctgcgcctccacaaccttcagattaaagacaagggtttgtaccagtgtataatacatcacaagaaacccaccggaatgattaggattcaccagatgaactcagagctgagcgtgctggctaacttcagccagcctgagattgtacctatctccaacattacagaaaatgtctacattaatcttacttgcagcagcatacacggctatccagagcccaaaaagatgtccgtgctgctccgaactaaaaatagcacgattgaatacgatggcgtgatgcagaagagtcaggacaatgtgaccgaactctatgatgttagcataagtctgagcgtcagcttccctgatgtaacttctaacatgactattttctgtatcctggagactgacaagacccggctcctttccagtcccttcagcatcgaactggaagatcctcagcctcccccagaccacatcccggagagcaagtacggtcccccctgcccatcctgccccgcccccgagttcctgggggggccctctgtgtttctctttccccctaaacctaaggacaccctcatgattagcaggactccagaagttacatgcgtggtggtggatgtcagtcaggaggaccccgaggtgcagtttaactggtatgtggacggtgtggaagtacacaacgccaaaaccaaaccaagagaagagcaattcaattccacttatcgcgtagtgagcgttctgaccgttctgcatcaggactggttgaatggaaaggaatacaaatgcaaggtgtccaacaaagggctgccctcaagcattgaaaagacaatatcaaaggctaaggggcagcccagggagccccaggtctacactctgccaccctctcaggaggagatgacaaaaaaccaggtgagtctgacctgtctggttaaggggttctacccctcagacatcgctgtggaatgggagagcaacggccagcccgaaaataactacaagacaactccgccagtcctggattctgatggctccttcttcctgtattccaggctgactgtagacaagagcaggtggcaggaggggaacgtgttctcttgctctgtgatgcacgaagcactgcacaaccactatacccagaagagcctctctctcagtctcggtaag

SEQ ID NO: 1059 - DNA, 1017 bp, synthetic construct
  misc_feature 1..1017: note = CD86 IgV-Q25I/F33L/H90I-IgG4 Fc polynucleotide
  source 1..1017: mol_type = other DNA
gctcctttgaaaatccaggcctatttcaacgagaccgctgacctcccgtgccagtttgctaattcacagaacatctctctgagcgaactggttgtcctgtggcaggatcaggagaaccttgttcttaacgaggtgtatttgggaaaggagaaatttgattccgtgcatagtaagtacatgggcaggacctccttcgacagtgattcctggaccctgcggcttcacaacctgcaaataaaagataagggcctgtaccaatgtatcatcatccacaagaagccaacggggatgattagaattcaccagatgaattccgagctgtccgttctggaatcaaaatatggccccccatgccccagctgtcctgcacccgagttcctgggcggcccgtctgtcttcctgttcccacccaagccaaaggatacactcatgattagcaggacccctgaagtcacatgtgtggtggtggatgtgagccaggaagaccctgaggtccagttcaactggtacgtcgacggcgttgaggtgcataacgcaaaaaccaagccacgagaggaacagtttaactccacctaccgagtcgtgtccgtgctgaccgtgctgcaccaagactggctgaacggtaaagagtacaagtgtaaggtctctaataaagggctgccaagcagcatagaaaaaaccataagcaaggccaagggacagccacgcgagcctcaggtctataccctgcctccaagccaggaggagatgaccaaaaatcaagtcagtctgacatgcctggtgaaagggttctacccttccgatattgccgtcgagtgggagagcaacggccaaccagagaataattacaagactaccccaccagtgttggatagtgatggtagtttctttttgtactctagactgacagtcgataagagcaggtggcaagagggaaatgtgttttcatgtagcgtgatgcacgaggcactccacaatcactatacacagaaatccctgagcctgagtcttgggaag

SEQ ID NO: 1060 - DNA, 1017 bp, synthetic construct
  misc_feature 1..1017: note = CD86 IgV-Q25V/F33L/H90I-IgG4 Fc polynucleotide
  source 1..1017: mol_type = other DNA
gctcctctgaaaatccaggcgtacttcaatgagaccgccgatctgccatgtcagtttgctaattcccagaatgtgtctctcagcgagctcgtggtgctttggcaggaccaggaaaacctcgtgcttaacgaggtgtatctgggaaaagaaaagtttgatagtgtgcactccaagtacatgggccggactagctttgactctgatagctggacactgcggctgcataatctccagatcaaggataaaggcctgtaccagtgcatcatcatccacaaaaagcctaccggaatgatccggatccaccagatgaattccgaactgagcgtgctggaaagcaagtatggtcccccatgcccgtcttgcccagcccctgagtttctgggcggccctagcgtctttctgttcccgcccaaacccaaggataccctgatgatatctcggacccctgaggtcacttgcgtcgtcgttgacgtgtcccaggaagacccggaggtgcagttcaactggtacgtggacggagtggaggtgcataacgctaaaactaagcccagagaagaacagtttaactccacctacagagttgtctccgtgctcacagttctgcaccaggattggcttaatgggaaagagtataaatgtaaagtgagcaacaaaggtctgccgtcttcaattgaaaaaactatctcaaaggccaagggccaaccaagggagccacaagtgtacacactcccacctagccaggaggaaatgacaaaaaaccaggtgtccttgacttgtctggttaaaggcttctacccctccgacatcgctgtggagtgggagagtaacggccagccagaaaataattataaaactacgccccctgttttggactcagacgggagtttttttctctattcccggctcacagtggacaaaagcaggtggcaggaggggaatgtcttttcctgtagtgtgatgcacgaggccctgcataatcattatacgcagaagtctctgtctttgtctctgggtaaa

SEQ ID NO: 1061 - DNA, 1017 bp, synthetic construct
  misc_feature 1..1017: note = CD86 IgV-Q25I/F33V/H90I-IgG4 Fc polynucleotide
  source 1..1017: mol_type = other DNA
gcacctctgaagattcaggcgtactttaacgagacagcagatctgccctgccagtttgccaactcccaaaacatttctctgagcgagttggtcgttgtctggcaggaccaggagaatctggtactgaatgaagtgtatctgggcaaagaaaaatttgacagcgtgcactccaagtacatggggaggacaagttttgacagcgactcatggacactgaggctccataacctgcagatcaaggacaaaggcttgtatcagtgtataataattcacaaaaagcctaccgggatgatcagaatccaccagatgaattccgaattgagcgtgctggagagcaagtacggcccaccgtgcccttcctgtcctgcccccgagtttctgggggggccctctgtgttcctgttccctcccaaacccaaggacacactgatgataagccgcaccccagaagtgacctgcgtggtcgtggacgtttcacaggaggatcccgaggttcagtttaactggtacgtggatggtgtcgaggtgcacaacgctaagacgaagccccgggaagaacagtttaactccacgtacagggtggtgagtgtgctgaccgtgctgcatcaggactggctgaatggtaaagagtacaagtgcaaggtgagcaacaaaggtctgccaagtagtatagaaaaaaccatctcaaaggcgaaagggcagccccgagaaccccaggtttacactctgcccccatctcaggaggaaatgactaagaatcaggtgagcctcacctgcctggtgaaaggcttttatccctccgacatcgcagtggagtgggagagtaatggccaaccagaaaacaactataaaactactccgcccgtcctcgactccgacgggtctttctttctctactcacggctcacggtggataagtccagatggcaggaggggaatgtgttctcttgttccgtgatgcatgaggcccttcataatcactacacccagaaaagtctgtcactgtcacttggaaaa

SEQ ID NO: 1062 - DNA, 1017 bp, synthetic construct
  misc_feature 1..1017: note = CD86 IgV-Q25V/F33V/H90I-IgG4 Fc polynucleotide
  source 1..1017: mol_type = other DNA
gctccactcaagatccaggcctacttcaacgaaacagccgaccttccgtgtcagtttgctaatagccagaatgtctctctgagcgaacttgttgttgtttggcaagaccaagagaacctcgtgttgaatgaggtctacttgggaaaggaaaagtttgacagcgtccactcaaaatacatgggaaggacgagctttgatagcgactcctggactctcagactgcacaacctgcagatcaaggacaagggactctaccaatgtatcatcattcataaaaagccaacagggatgatccgcatccaccagatgaattccgagttgtcagtactcgaaagcaaatatggtcccccttgtccttcctgcccagctcctgagttcttgggtgggcctagtgtctttctgtttccccccaaacctaaagataccctcatgattagcaggacccctgaggtcacttgcgttgttgtagacgtgtctcaggaggaccctgaagtccaatttaactggtacgtggatggtgtcgaagtccacaacgccaagaccaagcctagggaagagcagttcaacagcacctatagggtggtgtcagtgctgacagtgcttcaccaggactggctgaacggcaaggagtacaaatgcaaggtatcaaataaaggcctgccctcttccatcgagaagaccattagtaaagccaagggtcagcccagagaacctcaggtttataccctgcccccaagtcaggaggaaatgaccaagaaccaggtgtctctgacctgtctggtgaaggggttttaccccagcgacatagcggtggaatgggaatctaacggtcagccggagaacaattacaaaaccaccccaccggtgctggactctgatggctctttcttcctgtattcccggctgaccgtggataagtcaagatggcaggaggggaatgtgttctcttgttctgtcatgcatgaggcactgcacaaccactacacccaaaagtctctgtctttgagcctgggcaag

SEQ ID NO: 1063 - DNA, 1017 bp, synthetic construct
  misc_feature 1..1017: note = CD86 IgV-Q25I/F33L/H90V-IgG4 Fc polynucleotide
  source 1..1017: mol_type = other DNA
gcccctctcaaaattcaggcctactttaacgagacggcagacctgccttgtcagttcgctaacagccagaacattagcctcagtgagctggtggtcctgtggcaggatcaagaaaacctcgttttgaatgaagtgtacctgggtaaggaaaaattcgattctgtgcactctaagtatatgggaagaacatcattcgactctgattcatggacattgagactgcacaacttgcagatcaaagataagggcctgtaccagtgtataattgttcataagaaaccaacagggatgataaggatccaccagatgaattctgagctctccgttctcgagagcaagtacggcccgccctgcccctcatgtcccgcccccgagttcctcggcggtccaagtgtgtttctttttccccccaagcctaaagataccctgatgataagcagaacccccgaagtgacgtgcgttgtggtggacgttagccaagaggaccccgaagtccaatttaactggtatgtggacggcgtagaagtgcacaacgctaagaccaagccaagggaggagcagtttaacagcacctacagggtcgtaagcgtgttgacagtgctgcatcaggactggctcaatggcaaagagtataaatgtaaggtctcaaataaagggttgcctagttctattgagaagactattagcaaggccaaaggacaaccaagggaaccacaggtgtacacattgcctccgtcacaagaggagatgactaagaaccaggtctctctgacatgccttgtgaagggcttttatccctcagacatcgccgtggaatgggaaagcaatgggcagcctgaaaacaactataagaccacccccccagtgctggactcagacgggtctttctttctgtacagtaggctgacggtggacaagtcccggtggcaggaggggaacgtgttttcctgctctgtgatgcatgaggcccttcacaaccattacacgcagaaatccctgtccctgtcccttggcaag

SEQ ID NO: 1064 - DNA, 1017 bp, synthetic construct
  misc_feature 1..1017: note = CD86 IgV-Q25V/F33L/H90V-IgG4 Fc polynucleotide
  source 1..1017: mol_type = other DNA
gcccccctgaaaatacaagcatactttaacgaaaccgccgatttgccttgtcagttcgccaacagtcaaaacgtgtctctgtcagagctggtcgtgctctggcaggatcaagaaaatctcgtactgaatgaggtgtatttgggaaaagaaaagtttgatagcgtccatagtaagtatatgggacgaaccagcttcgacagcgactcttggactttgaggttgcataatcttcagattaaggacaaaggactgtaccagtgcatcatcgtgcacaagaaaccaaccggcatgatacggattcaccagatgaactccgaactgtcagtgctggagtcaaagtatggcccaccatgtccatcttgcccagctcccgagttcttgggagggccaagcgtgtttctcttccctcccaagcccaaggataccctcatgatcagccgcacccccgaagtgacttgcgtggtggtcgatgtgagccaggaagaccccgaggtccaatttaactggtacgtggatggtgtggaagtgcataatgccaagacaaagcctagagaggagcagtttaattcaacttatagagtggtgtcagtcttgacagtgctgcaccaggactggctcaatggcaaggagtataaatgcaaagtgtcaaacaagggtctgcctagctctatcgaaaaaaccattagtaaggccaagggacagccaagagagccgcaggtgtacacccttccgccgtctcaagaggagatgactaagaaccaggttagcctcacgtgcctcgtgaagggtttttatccttccgatatagccgttgagtgggaatctaacggacagccggagaataattacaagacgacccccccagtcttggatagcgatggcagcttcttcctgtattcccgactgactgttgacaaatcccgatggcaagaagggaatgtgtttagctgttctgtcatgcatgaagccctgcacaaccactacacgcagaagtccctgtccctcagccttggcaaa

SEQ ID NO: 1065 - DNA, 1017 bp, synthetic construct
  misc_feature 1..1017: note = CD86 IgV-Q25I/F33V/H90V-IgG4 Fc polynucleotide
  source 1..1017: mol_type = other DNA
gctcccctcaaaatacaagcctacttcaatgagaccgcagacctgccatgccagtttgccaatagtcagaacatctcactgagcgagttggtcgtggtttggcaggaccaggaaaacctggttctgaacgaggtctacctgggaaaggagaagtttgactctgtccatagcaagtacatggggcgcacatccttcgatagcgatagctggaccctgcgccttcacaacctgcaaattaaagataaaggattgtaccagtgcattattgtgcataagaaacccaccggaatgataaggatccaccaaatgaactcagaactgtctgtacttgagtccaaatacggaccaccatgccctagctgtccagccccggaatttttgggcggaccgagcgtcttcctgttcccaccgaaacctaaagatactctcatgataagcagaaccccagaggtgacgtgtgtcgtggtcgacgtgtcccaggaggatcccgaggttcagtttaactggtacgtggatggcgtggaggtccacaacgcaaagacgaaaccaagagaagagcagttcaacagtacctatagggttgtgtcagtcctgaccgtactccaccaagattggctgaatggaaaggagtacaagtgtaaagtgtccaataagggtctgccctcatccatcgagaaaaccatctcaaaagccaaaggacaaccacgcgaaccccaggtgtacaccctccccccatcacaggaagagatgaccaaaaaccaggtgagtttgacctgtttggtgaaaggcttctatccttccgatatcgccgtcgagtgggaaagcaacggccagcctgagaacaattacaaaacgactcccccagttctcgacagcgatggaagcttttttttgtattcaaggctcacagtcgacaagtctagatggcaggaaggtaacgtgtttagttgcagcgtgatgcatgaggcgttgcacaatcattacacccaaaaatcattgagcctgtctctgggcaag

SEQ ID NO: 1066 - DNA, 1017 bp, synthetic construct
  misc_feature 1..1017: note = CD86 IgV-Q25V/F33V/H90V-IgG4 Fc polynucleotide
  source 1..1017: mol_type = other DNA
gcgcccctgaaaatccaggcgtatttcaatgaaaccgctgatctgccatgccagttcgccaactcccaaaacgtgtctctcagcgaactcgtggtggtctggcaggatcaggaaaatctcgtcctgaacgaggtgtacctcgggaaggaaaagtttgatagcgtgcactctaaatatatggggagaaccagctttgactccgattcttggacacttagattgcacaacctgcagataaaggataaaggcttgtatcaatgcatcatcgtacacaagaagcccacaggaatgatccgcatccaccagatgaactctgagctgtccgtgctggagtccaagtatggacccccatgcccatcctgcccagcccccgagtttttgggggggcccagcgtctttctgtttcctccaaagcctaaagatacactgatgattagcagaacacccgaggtcacctgtgtggtagtggacgtgagccaggaggatccagaagtccagtttaattggtatgtggacggcgtcgaggttcacaacgcaaagaccaagccccgcgaggaacagtttaactcaacataccgagttgtgtcagtgttgacagtcctgcaccaggattggttgaatggaaaggaatacaaatgtaaggtctctaacaaaggcctgccttccagcatagagaaaaccatctccaaggctaagggacaacccagggagccacaggtgtacacactgccgccctcacaagaggaaatgacaaaaaatcaagtgtctttgacgtgccttgttaagggcttttatccatctgacatcgccgtcgaatgggagagcaatgggcaacctgaaaacaactacaagacaactccccccgtcctggattctgatggatctttctttttgtattctagactgaccgtagataagagcaggtggcaggaaggtaacgtgttcagctgtagcgtgatgcacgaagctttgcacaaccattacacacagaaaagtctctctttgagtctgggcaag

SEQ ID NO: 1067 - DNA, 1017 bp, synthetic construct
  misc_feature 1..1017: note = CD86 IgV-A13L/Q25I/F33L/H90I-IgG4 Fc polynucleotide
  source 1..1017: mol_type = other DNA
gcacctctgaaaatccaggcatatttcaacgagacactggatcttccatgccagttcgccaatagccagaacatttccctgagcgaactcgtggtcctgtggcaagaccaagagaacctggtgctgaatgaagtgtatctgggaaaggagaagtttgacagcgtgcattctaagtacatggggcgcacttcctttgacagcgacagctggactctgaggctgcacaatctgcagatcaaggacaaagggctgtatcagtgtatcataatccacaaaaagccgaccggaatgatcaggattcaccagatgaacagtgagctgtctgttttggagagcaaatatgggccaccctgccctagctgccctgccccagagtttcttggaggaccttccgtttttctgttccccccgaagcccaaagacactctcatgattagcaggacacctgaggtgacctgcgtagtggttgatgtctctcaagaggaccccgaagtgcagtttaattggtacgtggatggagtggaggtgcacaacgccaagaccaaacctagggaggagcagttcaacagtacttatcgggtagtatccgtgctgaccgtgctgcaccaggattggcttaatggcaaagaatataagtgtaaggtgtcaaacaaggggctgccctcatctatcgaaaagacaatctccaaagccaaggggcagcccagagagccacaggtttacacactgcctccatcacaggaggagatgactaagaaccaagtgagcttgacctgtctggtcaaaggcttctacccgagcgatatcgccgtcgaatgggagtctaacgggcagccagaaaacaattataaaactaccccacctgtccttgattctgacgggagctttttcctgtacagtagacttaccgtggacaaatctagatggcaggaagggaacgtgttctcatgcagcgttatgcacgaagccctgcataaccactatacccagaagagtctgtcactttcattggggaaa

SEQ ID NO: 1068 - DNA, 1017 bp, synthetic construct
  misc_feature 1..1017: note = CD86 IgV-A13I/Q25I/F33L/H90I-IgG4 Fc polynucleotide
  source 1..1017: mol_type = other DNA
gcccctctgaagatacaggcttatttcaacgagactattgacctgccttgccagttcgcaaatagtcagaacatctccctgtctgaactggtggtcctgtggcaggaccaggagaacttggtgctgaatgaagtgtacctgggcaaggaaaaattcgattccgtgcactcaaagtacatggggaggacatcattcgactccgattcctggactcttcgcctccacaaccttcagattaaggacaagggcctgtatcagtgtatcatcattcacaagaagcccaccggaatgattcgaattcaccaaatgaactccgagctcagcgtgctggaatccaaatacggaccaccgtgcccgagctgtcccgcacctgaattcctcggcggaccatcagtcttcctgtttcccccaaagcccaaagacaccctgatgatcagcaggactcccgaggtgacttgcgtagtggtggatgtgtcccaagaagacccagaggttcagtttaactggtacgtcgacggcgtagaggttcacaacgccaagaccaagccccgcgaagagcaattcaatagtacctacagggtggtatccgtcctgaccgtgcttcaccaggactggcttaatgggaaagagtacaaatgcaaagtgtccaataagggccttcctagttccatcgagaaaaccatctctaaggccaaaggacagccacgggagccccaagtatatacgttgccaccctcccaggaagagatgacaaagaaccaggtcagcctcacatgtcttgtaaagggattttatcccagcgacattgcagtggaatgggaaagcaacggccagcctgaaaataattacaagacgacaccaccggtccttgattccgacgggagcttttttctgtattctaggttgacagtggataaatcaagatggcaggagggaaatgtcttcagctgctccgtgatgcacgaagctctgcataaccactatactcagaagagcctgtccctgtctctgggcaaa

SEQ ID NO: 1069 - DNA, 1017 bp, synthetic construct
  misc_feature 1..1017: note = CD86 IgV-A13L/Q25V/F33L/H90I-IgG4 Fc polynucleotide
  source 1..1017: mol_type = other DNA
gccccactcaagattcaggcatatttcaatgagaccctggacttgccatgccagttcgctaatagccagaatgtttccctcagcgaattggttgtactgtggcaggaccaggagaaccttgtgcttaacgaggtgtacttggggaaggagaagtttgactctgtgcatagtaaatatatgggccgcacctctttcgactcagactcatggacgctgcgcctgcacaacttgcagatcaaggacaagggcctgtaccagtgcatcataatacacaagaaacctacaggcatgatccgcatccaccagatgaacagcgagctgtccgtcttggagtccaagtacgggcccccctgcccctcttgtcctgctccagagtttttgggtggcccttccgtctttctgttccctcccaagcctaaggacaccctgatgattagccgcacacccgaggtcacttgcgtagtggtggacgtgtcacaggaggatcctgaggtccagtttaactggtacgtggacggtgtcgaagtccataacgccaagactaaaccccgcgaagagcagttcaactccacttatcgcgtggtgtctgtcctgacggtgctccaccaggactggctgaacgggaaagagtacaaatgtaaagtgagtaacaagggactgccttcttccatcgaaaaaactatctccaaagcgaaaggtcagccacgcgagccccaggtgtatacactccctccttcacaggaggaaatgaccaagaatcaagtgagcctcacctgtctggttaaagggttctaccctagcgacatcgctgtcgaatgggaatctaatggacagcccgaaaataattacaagaccactcccccagtcttggatagcgacgggtcctttttcctctattcaagattgaccgtggacaaatctaggtggcaggagggcaatgtgttcagttgctctgtcatgcacgaagccttgcataaccactacacccagaaatctttgagcctctctctcggtaag

SEQ ID NO: 1070 - DNA, 1017 bp, synthetic construct
  misc_feature 1..1017: note = CD86 IgV-A13I/Q25V/F33L/H90I-IgG4 Fc polynucleotide
  source 1..1017: mol_type = other DNA
gcacccctgaaaatccaagcttatttcaatgaaacaatcgacctgccttgccagtttgccaactcccagaacgtctccctgtcagaactggtcgtgctctggcaggaccaggagaacctggttctgaatgaggtatatcttggaaaggagaagtttgactccgtccactctaagtatatgggacggacatccttcgatagcgactcctggactctcaggcttcataacctgcagatcaaggataaaggcctgtaccagtgtataatcatccacaaaaagccaactggaatgattcgaatccaccagatgaactccgagctgagcgtgctggagagcaagtacgggccaccttgcccatcctgtcccgcacccgagttcttggggggcccttctgtttttctttttccaccaaagccgaaggatacactgatgattagccgcacccctgaagtgacttgtgtggttgttgacgtgagtcaggaggaccccgaagtgcagtttaactggtacgtcgacggtgtggaagtccacaacgcaaagaccaagccacgggaagagcagtttaattcaacataccgggtggtgagcgttttgaccgtgcttcaccaggattggctcaacggcaaggagtataagtgtaaagtctcaaacaaggggctcccctccagcattgaaaaaaccatcagtaaagcaaagggacagccacgggagccgcaagtgtacactctccccccctctcaggaagagatgaccaaaaaccaggtgtccctgacctgccttgtgaaaggcttttatccctccgacattgctgttgagtgggagtcaaatggccagccagagaataactataagactactccgccagttctggattccgacggctcattcttcctgtactcacgcctgaccgtcgataagtctcggtggcaggagggcaacgtattctcttgttcagtaatgcacgaggcactgcacaatcattacacccagaagtccttgtctctgagtctcgggaag

SEQ ID NO: 1071 - DNA, 1017 bp, synthetic construct
  misc_feature 1..1017: note = CD86 IgV-Q25I/F33L/I89L/H90I-IgG4 Fc polynucleotide
  source 1..1017: mol_type = other DNA
gctcccctgaaaatccaggcatactttaatgagaccgcagacctgccttgtcagttcgcaaatagccagaacatttctctcagcgaactggtggttctgtggcaggaccaagaaaatttggttttgaatgaggtctatctcggtaaagaaaagttcgattccgtgcatagcaagtatatgggaaggacatctttcgacagcgattcctggacattgcggctgcacaacctgcagatcaaggataaagggttgtatcagtgtatacttatacacaaaaagcccactggaatgattcgcatccaccaaatgaatagcgaattgagcgtgctcgaatccaagtatggccctccatgccccagctgtccagccccagaattcctggggggtccctctgttttcttgttcccgcctaaaccaaaggataccctgatgatttcaaggaccccagaagtgacatgcgtcgtggttgacgttagccaggaggatcctgaagtgcaatttaactggtacgttgatggagtggaagtgcataatgccaagacaaagcctcgagaagaacagtttaattccacttacagagtggtgagtgtgttgacagtactccaccaggattggttgaatggcaaggaatataagtgtaaagtgtccaacaaaggcctgccctcttcaatcgagaagactatcagtaaggcaaaggggcaaccacgggagccacaggtttacacgttgccaccttcacaggaagagatgacgaaaaaccaggtttccttgacgtgcctggttaaaggcttttacccctctgacatcgccgtggagtgggagagcaacggccaacctgaaaacaactacaagaccacacccccagtgctggattcagatggctctttcttcctgtatagccgattgaccgtcgataaaagtagatggcaggaagggaacgttttcagttgtagtgtcatgcacgaggcactgcataatcactacactcagaagtccctcagcctgagtctcggcaaa

SEQ ID NO: 1072 - DNA, 1017 bp, synthetic construct
  misc_feature 1..1017: note = CD86 IgV-Q25I/F33L/M60R/H90I-IgG4 Fc polynucleotide
  source 1..1017: mol_type = other DNA
gcccccctgaagattcaggcttactttaatgaaactgcagatctgccctgccagttcgccaacagtcagaacattagcctgtcagaattggtggtgctgtggcaggatcaggaaaatctggtcctgaacgaagtttatttggggaaagaaaaattcgactccgttcactctaaatatcgagggagaacgagctttgattccgattcctggacgctgaggctgcacaatctccagatcaaagacaagggactttatcaatgcatcatcatccacaagaagccaacgggcatgattagaattcatcagatgaacagcgagttgagcgttctggagtctaagtatggccccccttgcccatcatgtccagcacccgagtttctcggtggcccttctgtctttctgtttccaccaaagcccaaagatactctgatgatttcacgcacccctgaagttacctgcgtggtggttgacgtgagtcaggaggatcccgaggttcaattcaactggtacgtggacggcgtcgaagtgcacaacgctaaaaccaagccacgagaggagcagtttaattctacctaccgggtggtcagcgtcttgaccgttttgcatcaagactggctcaacggaaaggaatacaaatgtaaggtgagcaataaaggactgccttcctccattgagaaaaccatctccaaggcaaaaggtcaaccccgcgaaccccaggtttacaccttgccgccaagccaggaggagatgacgaaaaaccaggtgagtttgacctgtcttgtgaagggattctacccttcagacatcgcagtggagtgggagtccaatgggcagccagagaataactataaaactacgcctcccgtgttggacagcgacggctcctttttcctgtacagcagactgaccgtggacaagagccggtggcaagagggaaacgtgttctcctgcagcgtgatgcatgaggccctccataatcactatacccaaaaatccctcagcctgtccctcggaaaa

SEQ ID NO: 1073 - DNA, 1017 bp, synthetic construct
  misc_feature 1..1017: note = CD86 IgV-Q25V/F33L/I89L/H90I-IgG4 Fc polynucleotide
  source 1..1017: mol_type = other DNA
gcccctttgaagatccaggcatatttcaatgaaacagccgacctgccctgtcagttcgctaacagccagaacgtgtccctctctgagctggtagtgctgtggcaggaccaagagaatctggtgctgaacgaggtgtacctggggaaagagaaattcgacagtgtgcacagcaaatacatgggcagaacaagtttcgactccgactcctggaccctgaggctgcataacttgcaaatcaaggataagggcctttaccaatgtatcctgattcacaaaaaacctacggggatgattcgcatacatcagatgaacagtgaactcagcgtgctggagagcaaatatggccccccatgtccatcatgccccgcccccgagttcctcggagggccctccgtgtttctgtttcccccaaagccaaaggacactctcatgatatcaagaactcctgaagtcacttgtgtggtggtggatgtgagccaagaggaccccgaagttcaatttaattggtatgtggatggagtggaggtgcataacgccaaaacaaagcccagagaggagcagtttaactctacttaccgggttgtctccgtgctgaccgtgctgcaccaagactggcttaatggtaaggaatataagtgcaaggtgagcaacaaaggcctgccttcaagtatcgagaaaacaatctcaaaagcgaaaggccagcctcgcgagcctcaggtctatacactgcctcctagccaggaggaaatgaccaagaaccaggtctccctgacatgcctggtcaaaggattttatccctccgatatcgccgtggagtgggagagtaacgggcagccggaaaataactataaaaccacacccccagtccttgactcagacggttccttcttcttgtacagtcgccttacagtggataagtcccgctggcaggaaggcaacgtattttcttgttctgtgatgcacgaggccttgcataatcactacactcagaagagtctgtccctgagcctgggcaaa

SEQ ID NO: 1074 - DNA, 1017 bp, synthetic construct
  misc_feature 1..1017: note = CD86 IgV-Q25V/F33L/M60R/H90I-IgG4 Fc polynucleotide
  source 1..1017: mol_type = other DNA
gcccctctcaagatccaggcttacttcaatgagactgccgatcttccttgtcagttcgcaaactctcagaacgtgtcactgagtgaattggtggtgttgtggcaggatcaggagaacctggtccttaacgaggtctatctggggaaagagaagtttgactctgtgcactcaaagtaccgcggcaggacttctttcgactcagattcttggactctgagacttcacaatctgcagattaaggataaaggactctaccaatgcatcattatccataaaaaacctaccggcatgattcggattcatcagatgaattcagagctgagcgtgctcgagtccaagtatgggcccccatgtccaagctgtccagcacctgaatttctcggaggtcctagcgtattcctgtttccccctaaacctaaagacacactgatgatctcaagaactccagaggttacctgcgtggtagtggacgtgagccaggaggatccagaggtgcagttcaactggtacgtggatggagtggaggtccacaacgctaaaactaagccgcgcgaggagcagttcaattccacatatagggttgtgagtgtgttgaccgtgctgcatcaagactggttgaatggcaaagagtataaatgcaaagtgagcaataaagggttgccatcaagtatcgagaaaaccatctcaaaagctaagggtcagccacgggagccccaagtgtatactctgcccccctcacaggaggagatgaccaagaaccaagtgagcttgacgtgccttgtgaaaggtttctatccatccgatatcgcagtggaatgggaaagcaatgggcagccggagaataactataagaccacaccacccgtgctcgattccgatgggtccttcttcctgtactctagattgactgtggataaatcaaggtggcaggaggggaacgtgttctcttgttcagttatgcatgaagcactccacaaccattacacacagaagagcctctctctctccctcgggaag

SEQ ID NO: 1075 - DNA, 1017 bp, synthetic construct
  misc_feature 1..1017: note = CD86 IgV-Q25F/F33L/H90I-IgG4 Fc polynucleotide
  source 1..1017: mol_type = other DNA
gcacctctgaagattcaggcatatttcaacgagacagcagacttgccatgccagtttgccaactctcagaacttcagcctctctgagttggtggtcctgtggcaggaccaggagaatctcgtcctgaacgaagtctacttgggcaaggagaaatttgattccgtgcactcaaaatatatgggccggaccagcttcgactcagacagctggacattgcgacttcacaacctgcagatcaaagataaagggctgtaccagtgtatcattatacataagaaacccacaggcatgatccggatccaccagatgaacagcgagctctcagtgctggagagtaagtacggccctccctgtccctcatgccctgccccagaattcctgggcggtccttcagtgtttctgttcccacctaaacccaaagacactcttatgatctctcgcacccccgaggtgacatgcgtggtggtggatgtgtcccaggaagatcccgaggtgcagtttaattggtacgttgacggggtcgaagttcacaatgctaaaaccaaacctcgcgaagaacaattcaattccacatatagggttgtgagcgtgttgaccgtcttgcatcaagactggctgaacggtaaggaatacaaatgcaaggtgtccaacaaaggcctgccaagctctattgaaaaaaccatctcaaaggccaaaggacagcctagagaaccacaagtttatacgctgccaccctctcaggaggagatgaccaaaaaccaggtctccctcacttgcctggttaagggattctatcctagcgacatcgcggtcgagtgggagtcaaatggccagccagaaaataattacaagacaaccccacctgtgctggatagcgatggttccttctttctgtattctcggcttacagttgacaagtcaaggtggcaggaaggaaatgttttctcttgctctgtgatgcatgaagcactgcacaatcattacacacagaagagcctgtccttgtcccttgggaag

SEQ ID NO: 1076 - DNA, 1017 bp, synthetic construct
  misc_feature 1..1017: note = CD86 IgV-Q25I/F33L/H90F-IgG4 Fc polynucleotide
  source 1..1017: mol_type = other DNA
gcgccgctgaaaatccaggcttatttcaatgagaccgcagacttgccctgccagtttgctaattcccagaacattagcctgtccgagctggtcgttctctggcaggatcaggagaacctcgtgctgaatgaggtgtacctcggcaaggagaagtttgatagtgtacactccaaatacatgggccggacttcatttgactctgattcctggactttgcgactgcacaatcttcagatcaaggataagggactgtaccagtgtattatattccataaaaaacccaccggcatgatccggatacaccagatgaattccgagctgtccgtgcttgaaagcaagtatggacctccctgtcccagctgtcccgccccagagttccttggggggcctagtgtattcctctttccacctaagcctaaggacacactgatgatctcccgcacacccgaggttacttgtgtcgtggtggacgtctctcaggaggatccagaagtgcagtttaattggtatgtggatggagtcgaggtccataacgctaagaccaagccccgggaggagcagttcaactccacttatagagtcgtctccgttctgaccgtgctgcaccaggactggttgaacggaaaagaatacaagtgcaaagtgagcaacaaggggctcccctcatctatcgaaaagacaatctctaaagctaagggccagccccgcgagccgcaagtgtatactctgcccccatcccaggaggaaatgaccaaaaatcaggtgagcctcacatgtctggtcaagggcttctaccctagcgatattgcagtcgagtgggagtccaacggacagccggagaataattacaagaccactccacccgtgctggacagtgacggaagttttttcctttatagccggcttactgtggacaaaagcaggtggcaggagggcaacgtgttctcctgctctgttatgcacgaagctctgcacaatcattacacccaaaaatcccttagcctgtctctcgggaaa

SEQ ID NO: 1077 - DNA, 1017 bp, synthetic construct
  misc_feature 1..1017: note = CD86 IgV-Q25I/F33A/H90I-IgG4 Fc polynucleotide
  source 1..1017: mol_type = other DNA
gcaccccttaaaatccaggcgtacttcaacgagaccgctgatctcccgtgccagttcgccaattcacaaaacatctccttgtctgagctggtcgtagcctggcaggatcaggagaacctggtcctgaatgaggtctatctgggcaaagaaaagtttgactctgttcacagcaagtacatgggtaggacaagcttcgactccgactcatggacgctccggctgcacaatttgcaaatcaaggacaagggtctgtaccagtgtatcattattcataagaagcccacaggcatgatcagaattcatcagatgaatagtgagttgagcgtgctggagtctaaatacgggccgccatgcccttcttgcccagccccggaattcctggggggacctagcgtcttcctgttccctcctaaaccaaaagacacgctcatgatttcccgcacaccagaggtgacttgtgtggtggtggacgtcagtcaagaggacccagaagtgcaatttaattggtacgtcgacggggttgaggtacacaacgctaaaactaaaccacgggaggaacagtttaacagcacctaccgggttgtcagtgtgcttactgttctgcaccaagactggctgaatgggaaagagtacaaatgtaaggtgagcaataagggactgcctagcagtatcgagaagaccatatcaaaggctaaggggcaacctcgggaaccacaggtgtacaccctgccaccttcacaggaggagatgacgaaaaatcaggtctcattgacctgcttggttaagggcttctatccctccgacattgcagtggagtgggaatctaacggtcagccagaaaataattacaaaacaactccccccgtgttggacagcgatggctctttcttcctttactcacggctgactgtggataagagccgctggcaggagggcaatgttttctcctgtagcgtgatgcatgaggccctgcacaaccattacacacagaagtcattgtccctgagcctgggaaag

SEQ ID NO: 1078 - DNA, 1017 bp, synthetic construct
  misc_feature 1..1017: note = CD86 IgV-Q25I/H90I-IgG4 Fc polynucleotide
  source 1..1017: mol_type = other DNA
gcgcctctcaagattcaagcctactttaacgaaacagctgacctgccgtgccagttcgcaaatagccaaaacatctccctgagcgaactggttgtattctggcaggatcaggagaaccttgtgctgaatgaagtgtatctgggtaaggagaagtttgactccgtgcactcaaagtacatgggcaggacctcatttgatagcgacagttggacacttaggcttcacaatctgcaaatcaaagacaaaggcctgtatcagtgtatcatcatccataaaaaacctacaggaatgattcgaatccaccagatgaatagcgaactgtccgtcctcgagagtaagtacggaccaccttgcccttcctgtccagcacccgagtttttgggcgggcctagcgtctttctgttccccccaaaacccaaagacaccctgatgatcagcagaacacctgaggtaacctgcgtcgtggtagacgtgtcccaggaggaccctgaggtgcaattcaactggtacgtggatggcgtggaggtgcacaacgccaaaacaaagccaagggaggaacagtttaattccacatacagagtggtctccgtgttgacggtccttcatcaggattggcttaatggcaaagaatataagtgtaaagtttcaaataagggcttgccctccagtattgagaagacaatctctaaggccaaggggcagccacgggagccacaggtctacaccctcccaccttcccaggaggagatgacgaagaaccaggttagcctgacttgccttgtgaagggattttacccttcagatatcgctgtggagtgggagtccaatggtcagccggaaaataactataaaactacgccacctgtgttggacagcgatgggtccttcttcctgtattccagactcacagtcgacaaaagtaggtggcaggaaggcaatgtgttctcttgctcagtgatgcacgaagccctgcataatcactacactcagaagtctctgagtctgtccctcggaaaa

SEQ ID NO: 1079 - DNA, 1017 bp, synthetic construct
  misc_feature 1..1017: note = CD86 IgV-Q25V/H90V-IgG4 Fc polynucleotide
  source 1..1017: mol_type = other DNA
gctcccctcaagattcaggcctattttaacgaaactgccgatttgccatgtcaatttgctaactctcagaacgtgagcctgtccgaactggtggtgttttggcaggaccaggagaatctggtgctcaatgaagtgtacctgggcaaagaaaaatttgacagcgtgcactctaagtacatgggaaggacctcctttgacagcgactcctggacactcagacttcataatctgcagattaaggataaaggattgtaccagtgtataattgtgcataagaagccaaccggcatgattcggattcaccagatgaacagtgaattgtctgtgctggagagtaaatatggcccgccctgtccctcttgtccagctccagagttcttggggggacctagtgtgttccttttcccacccaaaccaaaggacaccctgatgatttctagaacccccgaggtgacatgcgtagttgttgatgtctcacaggaggacccagaagtgcagttcaattggtatgtcgatggcgtggaagtccacaatgcaaagactaagcctagagaagaacagtttaactctacctaccgggtagtgtcagtcctgaccgtactgcatcaggactggcttaatggtaaggagtataagtgtaaagtgtctaacaaaggtctgccctccagcatcgaaaaaaccatcagcaaggcaaaagggcagccccgcgagccacaggtgtacaccctgccgccttcacaggaggagatgacaaaaaaccaggtctctcttacctgcctggtgaagggcttctatccttcagacattgccgttgagtgggagagtaatggacagccagagaacaattataaaaccactccgcccgtgcttgacagtgacggctccttcttcctttattctagactgactgtggataagtctcgatggcaggaagggaacgtattttcctgctcagtcatgcatgaagcgttgcataaccactacacacagaagtccctcagcttgtccctgggaaag

SEQ ID NO: 1080 - DNA, 1017 bp, synthetic construct
  misc_feature 1..1017: note = CD86 IgV-Q25V/H90I-IgG4 Fc polynucleotide
  source 1..1017: mol_type = other DNA
gctcccctgaaaatacaagcctattttaacgagaccgccgatctgccatgccagtttgcgaattcccaaaacgtgagcctctccgaactggtggtcttctggcaggaccaggagaacctggtgctgaacgaggtgtacctgggcaaggagaaattcgacagcgttcatagtaaatacatgggcagaacttctttcgacagtgacagttggacccttagactgcacaatctgcagatcaaagacaaaggcctgtatcagtgcattattatccataagaagcccaccggcatgatcagaattcatcagatgaattcagaactttcagtgttggaaagcaaatacgggcccccctgtcccagctgcccagccccagaatttctgggcggcccctctgtcttcctttttcctcccaagcctaaagatacactgatgatcagccggaccccagaagttacctgtgtcgtggtggacgtgagccaggaggaccccgaagtgcagtttaactggtacgtagatggagtggaagtccacaacgccaagacaaaaccccgcgaggagcagtttaactccacatacagagtcgtgtcagtacttacagtgctgcaccaggactggctgaatggtaaggaatataaatgcaaagtttctaacaaagggctgccttcttcaatagagaagacaatttcaaaagccaaggggcagccaagggagccacaggtctacaccctgcctccaagccaggaagaaatgacaaagaaccaggtatcccttacatgccttgtcaaagggttctacccatcagacatcgccgtcgagtgggaatccaacgggcagcccgaaaacaattacaagaccacacctcccgtgctcgatagcgacggaagtttcttcctgtattcacgcctcaccgttgataagtcccgatggcaggagggaaatgtgttctcatgttcagtgatgcatgaggctctgcacaaccattatacccagaaatccttgtctctgagcctggggaaa

SEQ ID NO: 1081 - DNA, 1017 bp, synthetic construct
  misc_feature 1..1017: note = CD86 IgV-Q25F/H90I-IgG4 Fc polynucleotide
  source 1..1017: mol_type = other DNA
gcaccattgaagatccaggcttacttcaatgagacagcagacctgccctgtcaattcgctaacagccaaaactttagtctctctgaattggtcgtgttctggcaggatcaagagaatttggtgcttaatgaggtgtatctgggcaaagagaagttcgatagcgtccactcaaagtacatgggcagaactagttttgacagcgactcttggaccctgcgcctgcacaatctgcagataaaggataagggcctttatcagtgtatcatcattcataagaagcctacaggcatgatccgcatccaccagatgaacagcgagttgtccgtcctggagtctaagtacggacctccttgcccatcatgtccggcccctgagtttctgggaggcccctctgtttttttgtttccgccaaagcccaaagatacactcatgatcagcaggacacctgaggtcacatgtgttgtcgtagacgtttcacaggaggaccccgaagtgcagttcaactggtacgtggacggagtggaagtccataacgctaagactaagccacgcgaagagcaatttaactccacgtaccgagttgtctcagttttgaccgtgctgcatcaggattggttgaatggcaaggagtacaaatgcaaggtgagcaataagggcctgccctccagcatagagaaaacaatctccaaggctaaaggccagccaagggagccccaggtgtacacactgccaccttcccaggaggagatgactaagaaccaagtcagcttgacttgcctggtgaagggattctaccccagcgacattgctgtggaatgggaatctaacggtcaaccggagaacaattataaaactacacctcctgtcctcgacagcgacgggagtttttttctgtacagccggttgaccgtggacaagtccagatggcaggaggggaatgtgtttagctgttccgtaatgcatgaagcacttcacaaccattacacacagaagtcactgtcactgagtctcggcaaa

SEQ ID NO: 1082 - DNA, 1017 bp, synthetic construct
  misc_feature 1..1017: note = CD86 IgV-Q25F/H90V-IgG4 Fc polynucleotide
  source 1..1017: mol_type = other DNA
gcccctcttaaaatccaggcctatttcaatgagactgctgaccttccctgccagttcgcaaactcacagaacttttccctgtcagagctggtggtcttctggcaggaccaggagaacctcgtgttgaatgaagtgtatctggggaaggagaaattcgactccgttcattccaagtatatgggccggactagcttcgatagcgactcttggacactgaggcttcataacctgcagattaaagacaaaggactgtatcaatgcatcatcgtgcataaaaagccaactggcatgatccgaatccatcagatgaattccgagctgagcgtgctggaatcaaaatacgggcccccatgtccttcctgtcctgcaccagaattcctcggcggtcccagtgtcttcctctttccgcccaagccgaaggataccctgatgatcagtagaacccccgaagttacttgtgtggtggtggatgtttcccaagaagaccccgaggttcagtttaattggtacgtcgacggcgtggaagtgcacaacgctaagaccaagccacgagaagaacagttcaactcaacatatagagttgtgagcgtgctcacagttctgcaccaggactggcttaatggcaaggagtacaaatgcaaggtctctaataagggcttgccgtcaagcatcgaaaagaccatctcaaaagcaaagggccagccacgcgaacctcaggtgtatactctgcccccctcacaggaggaaatgacaaagaatcaagtgtcactcacttgcttggtcaaaggcttttatccatccgacatcgccgtggaatgggaaagcaatggccagcctgagaacaactacaaaactacacctcctgtcctggattcagatggaagcttttttctttactcacggctcactgtggataaatccagatggcaggagggaaatgttttctcttgtagtgtgatgcacgaagccctgcacaaccattacacgcagaagtcacttagcctgagtctgggcaaa

SEQ ID NO: 1083 - DNA, 1017 bp, synthetic construct
  misc_feature 1..1017: note = CD86 IgV-A13F/Q25I/F33L/H90I-IgG4 Fc polynucleotide
  source 1..1017: mol_type = other DNA
gctcccctcaagattcaggcttattttaatgagaccttcgatctcccctgtcagtttgcaaattcacagaacatttcattgtccgagttggtggtgctgtggcaggatcaggagaatctggtgctgaatgaggtgtacctgggtaaggagaagtttgacagtgttcacagcaagtacatggggaggacctcctttgacagcgacagctggaccttgaggctgcacaatctccaaatcaaggataagggactgtaccagtgcatcattatccataagaagcccacaggaatgattcggattcaccagatgaatagtgaactctccgtgctggagtccaaatacgggccaccctgcccgagctgtcccgcccctgagtttctgggagggccctctgtattcctctttccccccaagcctaaagataccttgatgatctcccgcactcctgaagtgacatgcgtggtcgtggacgtctctcaggaggatccagaagtgcagtttaattggtatgtcgacggcgtggaagttcataatgccaagacaaagcctagagaagagcagtttaattcaacatacagagtggtgagtgtgttgacagtcctccatcaggattggcttaacggaaaagagtacaagtgtaaggtctctaataagggcctgccatccagcattgagaagacaatttccaaggcaaaaggccaaccgagggaacctcaggtgtataccttgcccccatctcaggaggagatgacaaagaatcaggtgtctcttacttgcctggtcaagggtttttatccatcagacatcgcagtggagtgggaatctaacggacagcccgaaaacaattacaaaacaacccctcccgtcttggactctgacggttccttctttctgtattctaggctgaccgttgacaaaagccgatggcaggagggtaatgtttttagctgttcagtcatgcacgaggctctgcacaatcactatacccagaagtccctgtctctgagtctcggaaaa

SEQ ID NO: 1084 - DNA, 1017 bp, synthetic construct
  misc_feature 1..1017: note = CD86 IgV-A13M/Q25I/F33L/H90I-IgG4 Fc polynucleotide
  source 1..1017: mol_type = other DNA
gcaccgctcaaaatccaggcctacttcaacgagaccatggacttgccctgtcaatttgctaattcccagaacatttctttgagcgaactcgtcgttctgtggcaagaccaggagaatctggtgctcaacgaggtctaccttggcaaggagaagttcgactcagtgcactcaaaatacatgggccgcacaagcttcgattctgatagctggacattgaggctgcataatctgcagatcaaagacaaaggactgtatcaatgtattatcatccacaaaaaaccaacagggatgattaggattcaccaaatgaacagtgagctgagcgtgctggagtcaaagtatggacccccttgtcctagctgtccggcaccggaattcctggggggcccatccgtcttcctgttcccacctaagcccaaggatactctcatgatttcccgcacccccgaggtgacttgcgtggtggtggatgtttcccaagaagatcccgaggttcagtttaattggtacgtggacggagtggaagtgcacaacgcaaagaccaaaccacgagaggaacagttcaattctacttaccgggtcgtgtcagtcctgaccgtgctgcaccaagactggctcaatggaaaggagtataagtgcaaggtgagtaataaggggctgccctcttccatcgaaaagaccatctccaaagccaaaggtcaacccagggaaccacaggtatatacgcttcctccttctcaggaggaaatgaccaagaatcaggtgtcactgacttgcttggttaaagggttctaccctagcgacatcgcagtggagtgggagagtaacgggcagccagaaaataattacaaaaccacccccccagtcctggactctgatggctccttctttctgtatagtaggctgactgtcgataagtcccggtggcaggaggggaacgtgttttcatgttccgtgatgcatgaagccctgcacaaccattacactcagaagtcactgagcctctctctgggcaag

SEQ ID NO: 1085 - DNA, 1017 bp, synthetic construct
  misc_feature 1..1017: note = CD86 IgV-Q25A/F33L/H90I-IgG4 Fc polynucleotide
  source 1..1017: mol_type = other DNA
gcacccctgaagatacaggcctatttcaatgagactgcagatctcccctgtcagtttgctaattctcagaatgcgtctctgagcgagctggtcgtcctgtggcaggaccaggagaatcttgtgttgaatgaggtgtacctgggcaaggagaagtttgatagcgtgcactccaagtacatgggcagaacctctttcgactccgacagctggactttgagactccacaacctccagatcaaagacaagggcctttaccaatgcatcattatccacaaaaagccaactggtatgataaggatacaccagatgaatagcgagctgtctgtgctcgaatctaagtatggccccccctgtccgtcatgcccagccccagagtttctgggtggacctagtgtgttcctgtttccccctaagcctaaagatacccttatgatcagtcgcactccagaagtgacatgtgttgtggtggatgtctctcaggaagatcctgaagtccaatttaattggtatgtcgatggtgtggaggtccataacgccaagacaaaaccccgcgaagagcagttcaattccacctacagggttgtgagcgtactgactgttcttcatcaggactggctgaacgggaaggaatacaagtgtaaagtgagcaataagggcttgccctcctcaatcgagaagaccatcagcaaggccaaggggcagccccgggagccccaggtgtatacgttgccaccgagccaggaggaaatgacaaagaaccaggtctcccttacatgtctggtgaagggcttctatccgtcagatatcgcggtggagtgggagagcaacgggcagcccgagaataattacaaaaccaccccccccgtgctggacagcgatggctccttcttcctgtatagcaggctgacagttgacaaatcccgctggcaggaagggaacgtgttcagctgcagtgtgatgcatgaggctctgcataatcattacacgcaaaaatctcttagcctgtccttgggcaaa

SEQ ID NO: 1086 - DNA, 1017 bp, synthetic construct
  misc_feature 1..1017: note = CD86 IgV-Q25M/F33L/H90I-IgG4 Fc polynucleotide
  source 1..1017: mol_type = other DNA
gcccctctgaagattcaagcctactttaatgagactgccgacctgccctgtcagttcgcaaactctcagaacatgtctttgagcgagttggttgtcctctggcaggatcaggaaaaccttgtgctgaacgaggtctaccttgggaaggaaaagtttgatagcgtgcactccaagtatatggggcggacttctttcgactccgattcttggactctgcgcctgcataatctgcagattaaggacaagggcttgtatcagtgtatcatcattcataaaaagccaacaggaatgatcaggatacaccagatgaattccgagttgagcgtgcttgagagtaaatatggaccaccctgcccaagctgtcccgccccagaatttctggggggaccatcagtattcctgtttcccccgaagccgaaagacaccctgatgatcagtaggacacctgaggtgacttgtgttgtggtggatgtgtcacaggaagacccagaggtacagtttaactggtatgtggatggtgtagaggtgcacaacgctaaaaccaagcccagagaggaacagtttaactccacttatagagtcgtttccgtgctgaccgtgctgcaccaggattggctgaacgggaaggaatataaatgtaaagtgagcaacaaggggctgccctcatcaatagagaaaaccatctctaaggccaagggacagccgcgcgaaccccaggtgtatacccttccccctagccaggaagagatgacaaaaaatcaagtttccctgacatgcctcgtgaaaggtttctaccctagtgacattgcagtggagtgggagtcaaatggacagcccgagaacaattataagaccactccccccgtgctcgatagtgacggctctttcttcctttactcaaggctgacagttgacaagtctcgctggcaggagggcaacgtgttcagttgttccgtgatgcacgaggcccttcacaatcattatacccaaaagtccctgagcctttcccttggaaag

SEQ ID NO: 1087 - DNA, 1017 bp, synthetic construct
  misc_feature 1..1017: note = CD86 IgV-Q25I/F33M/H90I-IgG4 Fc polynucleotide
  source 1..1017: mol_type = other DNA
gcaccactcaaaatacaggcttactttaacgagaccgctgacctcccctgccaatttgcaaactctcagaacatctccctgagtgaactggtggtgatgtggcaggaccaagagaatttggtcctgaacgaagtgtatcttgggaaagagaaattcgattccgtacattccaagtacatgggcagaacttctttcgactctgactcctggaccctgagattgcataacttgcagatcaaggataagggcctctaccagtgtatcattatccataagaagcccacagggatgatcagaatccatcagatgaactccgagttgagcgtcctggagtccaagtacgggccaccctgtccttcctgccccgcccctgaattcctgggcggcccttctgtctttctgtttccccccaagcctaaggacactctgatgattagtagaacccccgaggtgacgtgtgtagtcgtggacgtcagccaggaggatcctgaggtgcagtttaattggtacgtggatggcgtggaagtgcataacgcaaaaacaaaacctcgagaggaacaattcaattccacctatagggtggtgtcagtgctgaccgtcctgcatcaggactggcttaatggcaaggagtataaatgtaaagtgtctaataaaggattgccgtcttccattgaaaaaactataagcaaggccaagggacaacccagagagccacaggtgtatactctgccaccttcccaggaagagatgaccaagaatcaggtgtctctcacctgcttggtaaagggcttctacccttccgacatcgccgtagagtgggagtctaacgggcagccagagaataactataagaccaccccacccgttctggactccgacggttctttcttcctgtacagtagactcaccgtcgataaaagccgctggcaggaggggaatgtgttctcttgcagcgtgatgcacgaggccctccacaaccactacacacagaaaagtctctctttgtccctggggaag

SEQ ID NO: 1088 - DNA, 1017 bp, synthetic construct
  misc_feature 1..1017: note = CD86 IgV-Q25I/F33L/I89V/H90I-IgG4 Fc polynucleotide
  source 1..1017: mol_type = other DNA
gctcctttgaaaatccaggcctattttaacgagactgctgatctgccatgtcagtttgccaacagtcagaacatcagcctgagtgagctggtggtgctctggcaggaccaggagaacctcgtgctgaacgaagtctatttgggaaaggaaaagtttgattccgtgcacagtaaatatatgggacgaacctcatttgacagcgatagctggactctccgcctccacaatctccagataaaggacaaaggtctgtatcagtgcattgtcatacataagaagcccactgggatgattaggatccaccagatgaactccgagttgtctgtgctggagagcaaatacggacccccatgtccctcctgtcccgctcccgaattccttggcggaccttccgtgtttctgtttcctccgaaacctaaagatacgctgatgatatcccgcacgcctgaggtgacatgcgtcgtggtggacgtctcacaagaagatccagaggtccagttcaactggtacgtggatggggtggaagtccataacgcaaagaccaagccacgggaggagcagtttaacagcacatatcgggtcgtgagcgtcctgaccgtccttcaccaggactggttgaacggtaaagagtacaaatgcaaagtgtcaaataaagggctgccaagtagcattgaaaagactatcagcaaagcaaagggacagccccgggagccccaagtgtacactcttcccccctctcaggaggagatgacaaaaaatcaggtgagtttgacctgtctggtgaagggcttctatccttctgacatcgccgtcgagtgggaaagcaacggacagcccgagaataactacaagacaaccccccccgtgctggattctgacggttctttctttctgtacagtaggctgaccgttgacaaatctagatggcaggaagggaacgtttttagttgctcagtaatgcacgaggcgctgcacaaccactacacccagaaatccctgagcctgtcactgggcaag

SEQ ID NO: 1089 - DNA, 1017 bp, synthetic construct
  misc_feature 1..1017: note = CD86 IgV-Q25I/F33L/I89F/H90I-IgG4 Fc polynucleotide
  source 1..1017: mol_type = other DNA
gctcccctcaagattcaggcctactttaatgagactgccgacctgccctgccagttcgctaactcccaaaatatctctttgtccgagttggtggtgctgtggcaggaccaggagaatctcgtgctgaatgaagtctatctgggcaaggaaaagttcgattccgttcacagcaaatacatggggaggacatcctttgactcagacagttggactctgcggttgcacaatcttcaaattaaggataaaggactctatcagtgtatatttattcataaaaagcctacgggcatgattcgcattcaccagatgaacagcgaactctccgtcctggagtccaagtacggacccccgtgcccatcttgccccgcccctgagttcttgggcggcccaagtgtgtttctgttccccccaaaaccaaaagacaccctgatgatcagtcgcacccccgaagtgacctgcgtagtggtggatgtgtcccaggaggaccctgaagttcagttcaattggtatgtagatggagtggaggtgcacaacgctaaaactaaaccaagggaggaacagttcaacagtacctatagagtggtaagcgtcctcacagtgctgcaccaggactggctcaacgggaaggaatacaaatgtaaggtgtctaacaaaggcctgccctcctccatcgaaaaaactatctccaaagccaaaggtcagcccagagagccgcaggtctacaccctcccaccctcccaggaggagatgacaaaaaaccaggtatctctgacatgtctggtgaaggggttctatcccagcgacattgcagtggagtgggagtcaaacggacagcccgagaacaactacaagacaactccgcccgtgcttgactccgatggaagtttcttcctgtattcaaggctcacagtggacaagtcccgatggcaggaagggaacgtcttcagctgcagtgtgatgcacgaggcgcttcacaatcactacactcagaagtctctttccctctctctcggcaaa

SEQ ID NO: 1090 - DNA, 1017 bp, synthetic construct
  misc_feature 1..1017: note = CD86 IgV-Q25I/F33L/I89M/H90I-IgG4 Fc polynucleotide
  source 1..1017: mol_type = other DNA
gcaccgctcaaaatccaggcatatttcaacgaaacagcagacctgccctgtcaattcgccaactctcagaacattagcctgagtgaactggtggtcctgtggcaggatcaggagaatctggtattgaatgaggtctacctcgggaaagagaagttcgacagtgtccattctaagtacatgggtcgaacaagctttgacagcgatagttggacattgcggttgcacaatttgcagataaaagacaagggcctgtaccaatgcatcatgatacacaaaaagcccaccggaatgatcaggattcatcagatgaatagcgagctgagcgtgctcgaatccaaatatgggccaccctgtccaagctgtcccgctccggaattcctgggcggcccctccgttttcctgtttcctccaaagcctaaagacactctgatgattagccgcacgccggaggtgacgtgtgtggtcgtcgatgtcagccaggaggatccagaggtgcagttcaattggtacgtagatggtgttgaagtgcacaacgccaaaaccaaacccagggaagagcagttcaattctacttatcgcgtagtttccgtgctgacggtgctgcatcaggattggttgaacggcaaggaatataagtgtaaggtgtccaataaggggctgccttcaagcattgagaagacaatcagcaaggcgaaggggcagccccgcgagccccaggtgtacactttgccacccagccaagaagaaatgaccaagaatcaagtgtcacttacatgtctggtgaaaggcttttacccatccgatatcgcagttgagtgggagagcaacggacagcccgagaataactacaagacaaccccacctgtgctggattctgacgggagctttttcttgtacagcaggctgactgtggacaagtctagatggcaggaaggcaatgtgttttcatgtagcgtgatgcatgaggctctccataaccactacacccagaaaagcttgtctttgtccctggggaaa

SEQ ID NO: 1091 - DNA, 1017 bp, synthetic construct
  misc_feature 1..1017: note = CD86 IgV-Q25I/F33L/H90M-IgG4 Fc polynucleotide
  source 1..1017: mol_type = other DNA
gcccctctgaaaatccaggcgtacttcaatgagactgcagatctgccttgccagtttgcaaactcacagaacatctccctgtccgagctggtcgtgctgtggcaggatcaggagaatctcgtactgaacgaagtttatcttgggaaagagaaattcgatagtgtgcattcaaagtacatgggcagaacaagtttcgactcagactcctggacactgagacttcacaatctgcagatcaaggacaagggcctgtatcagtgtattatcatgcacaagaaaccaacagggatgattcggattcaccagatgaatagtgagctgtctgtgttggagagcaaatacggacccccatgccccagctgtccagcccccgagttcctgggtggtcctagcgtattcctgttccccccaaaaccgaaggacaccctgatgatttcccgaacaccagaagtgacgtgcgtggtcgtggatgtatcccaggaggaccccgaagtccagttcaattggtacgtggatggagtagaagtccataatgccaagactaagccccgggaggagcagttcaattccacataccgagtcgtgagtgtccttacagtcctgcatcaagactggctgaatggaaaagagtataaatgcaaggtgagcaataagggtctgccttccagtatcgaaaaaacgatttccaaggccaaagggcagcctagagagccacaggtgtacaccctccccccgtcccaagaggagatgacaaaaaatcaggtctctttgacatgcctcgtgaaagggttttatcccagcgacatcgccgtggaatgggagtccaatggccagccagagaacaattataagaccacacctccagtactggacagcgacggatcattttttctctactctaggttgactgtggacaaatcacgctggcaggaaggaaacgtgttctcctgcagtgtcatgcatgaggcactgcacaatcattacacacagaagtccttgtccctgtccctgggtaag

SEQ ID NO: 1092 - DNA, 1017 bp, synthetic construct
  misc_feature 1..1017: note = CD86 IgV-IgG4 Fc polynucleotide
  source 1..1017: mol_type = other DNA
gccccacttaagatccaggcatatttcaacgagaccgctgatctgccatgtcaatttgccaattctcagaatcagagtctctccgagctggtggttttttggcaggaccaggagaacctcgtcctgaacgaggtctacctggggaaggaaaagttcgattccgtgcattcaaagtatatgggccgcacctccttcgactccgatagttggacactgaggctgcacaacttgcagataaaggataagggtctgtaccagtgtatcattcaccacaagaaaccaaccgggatgattagaattcatcaaatgaactccgagctgtccgtactcgagtcaaaatatgggcccccttgcccatcctgtccagctcctgaatttcttggggggccctccgtattcctttttccccctaagcctaaggacacactcatgatctcaaggactcctgaggtgacttgtgtggtcgtcgacgtttcacaggaggaccccgaagtgcagtttaactggtatgtggatggagtagaggtacacaacgccaagaccaagcctcgcgaggaacagtttaactctacttatagagtcgtgagtgtgctgacggtgttgcaccaggactggctcaacggcaaagaatataaatgtaaggtgtctaacaaaggcctgccctccagtattgaaaaaaccatcagcaaggccaaaggacagcctcgggaaccccaggtgtacaccttgcctccatcacaggaagagatgactaagaaccaggtttccctgacctgcctcgtgaagggattctacccaagtgacattgcagtggaatgggagtcaaatggtcagccagagaataattataaaaccacccctcctgtgcttgacagcgatggctccttctttctgtactctagactgacagtcgataaatccagatggcaggaaggaaacgtttttagctgttcagtgatgcatgaggccctgcacaatcactacacccagaaaagcctgtctctctctttgggcaag

SEQ ID NO: 1093 - DNA, 1737 bp, synthetic construct
  misc_feature 1..1737: note = sugemalimab antibody heavy chain -CD86 IgV-Q25I/F33L/H90I polynucleotide
  source 1..1737: mol_type = other DNA
gaagtgcaacttctggagagtggtggaggtctcgttcaaccaggaggtagtctgaggctgagctgcgccgcttctggcttcacattcagttcctacgctatgtcttgggtgcggcaagctccgggaaagggacttgagtgggtgagtgggatctctggatctggtgggttcacttattatgcagactccgtaaagggtcggttcaccatctcacgggataatagcaagaacacattgtatttgcagatgaattctctgagggccgaggatactgctgtttactactgtgccaagcctccacgcggatacaactacggccccttcgactattggggacagggtacactggtaacagtgtcatccgcatccacaaagggaccatcagttttccccctggccccttgtagcagaagcacctccgagagcaccgcagctctcggatgcctggtgaaagactattttcccgagcccgtgactgtgtcctggaactctggcgctctgaccagtggagtgcatacctttccagccgtgctgcaaagcagcggcctgtatagcctgtcttccgtggtcacagtgccgtccagctctctgggcacaaaaacctatacctgcaacgtcgatcacaaaccatcaaacacaaaggtagacaaacgcgtcgagtctaagtatggacccccttgtcctccctgtcctgcaccagaattcttgggtggccccagcgtgttccttttccctccgaaacctaaggataccctcatgatctctagaacccctgaggtgacctgtgtcgttgtcgatgtttcacaagaagatcctgaggtgcagtttaattggtatgtggatggtgtagaagtacataacgccaagacaaaaccccgagaagaacagttcaacagtacataccgggttgtgtccgtactgacagtactccaccaggattggctgaatggaaaggagtacaagtgcaaggtgtcaaacaaagggctcccatctagcatcgagaagaccatctccaaagctaaggggcagccccgggaacctcaagtctacaccctcccgccatcccaggaagagatgacaaagaatcaggtgagccttacctgccttgtgaaaggcttttatccatctgacatcgccgtcgagtgggagagcaacggccaacctgaaaataattacaaaaccaccccgccggtcttggactctgatggttcatttttcctgtacagcaggctcaccgttgataaaagtcgctggcaggagggcaatgtcttcagctgctccgtgatgcacgaagccctgcataatcattacacgcagaaaagtcttagtcttagtctcggtgcaggaggagggggatctggaggaggaggttctggtggaggcggatcaggtggagggggaagtggtgctcccttgaaaattcaggcatatttcaatgagacagctgacttgccttgtcagtttgcaaattcccagaatatcagcctctcagagttggtggtgctgtggcaggatcaagaaaatctggtgcttaacgaagtgtacctgggtaaagagaagtttgactcagttcatagtaagtatatgggacgcaccagctttgacagtgactcatggactctgaggctgcacaaccttcagatcaaagataaaggtctgtaccaatgtatcattatacacaagaagcctaccggcatgattcgaatccatcagatgaatagcgaattgtctgttctg

SEQ ID NO: 1094 - DNA, 1737 bp, synthetic construct
  misc_feature 1..1737: note = sugemalimab antibody heavy chain -CD86 IgV-Q25V/F33L/H90I polynucleotide
  source 1..1737: mol_type = other DNA
gaggtacaacttctggaatcaggtggaggattggtacagcccggaggttcactgaggctgtcatgtgccgcatcaggttttacatttagctcctacgctatgagttgggtcagacaagccccaggcaagggcctcgaatgggtgagtggtatcagcggctcaggaggtttcacctactacgccgactcagtgaaaggccgctttacaatctctcgggacaatagtaagaatactctttacctgcagatgaactctctgcgggccgaggatactgccgtgtactattgcgccaaacccccaagaggatacaattacggccctttcgactactggggacagggaaccctcgtcacggtgagctctgcttccaccaaggggccatcagtctttccacttgcgccatgtagtcgcagcaccagcgaaagcaccgctgctctcggatgcctggtgaaggactattttccagaacctgtcacagtgtcttggaattctggggctctgactagtggagtgcatacattcccagctgtactgcagtcctccggtctttattctctgtcctccgtcgtgacggtcccaagcagctctctggggaccaagacttatacgtgcaatgtcgatcacaagccaagtaatacaaaggttgacaagcgggtcgagagcaagtacggacccccttgtcctccatgcccagcacctgaattcttgggcgggccttccgtttttctttttccccctaaaccaaaagatactctgatgatttcacgaacaccggaggtcacttgtgtggtggttgacgtctctcaagaggatccagaggttcagtttaactggtacgtagacggggtggaggttcacaacgccaagacaaagcccagagaagagcagtttaacagtacttacagggtggtatcagtgttgaccgtcctccatcaagactggttgaacgggaaagagtacaaatgtaaagtttccaacaagggcttgccaagttctattgaaaaaaccattagtaaagctaagggccagccccgagaaccacaggtctatacattgccacccagtcaggaggaaatgaccaaaaaccaggtctctctcacttgtcttgtgaaagggttctaccccagcgacattgccgtggagtgggaaagcaatggccagccagaaaataattataaaacaacaccgccagtgctggacagcgacgggtctttttttctgtattctcgacttactgtggacaaatctagatggcaagagggcaatgtgtttagttgtagcgtcatgcacgaagccctccacaaccactatacgcagaagtcattgagtttgagtctgggcgctggaggaggaggatctggaggtggaggaagtggtggtggcggaagtggaggaggaggaagtggggctccccttaaaatccaggcttatttcaatgagacagcagatctgccctgccagttcgccaacagccagaatgtgagcctgagtgaactcgtcgtgctgtggcaggaccaggagaacttggtgctgaacgaagtgtatttgggcaaagagaaattcgactcagtgcactcaaaatacatgggccgcacaagctttgattcagattcatggaccttgcgattgcataacttgcaaatcaaagacaagggactttaccagtgcattatcattcataagaagcccacaggcatgatacggattcaccagatgaattctgagctgagcgtgctt

SEQ ID NO: 1095 - DNA, 1737 bp, synthetic construct
  misc_feature 1..1737: note = sugemalimab antibody heavy chain -CD86 IgV-Q25I/F33V/H90I polynucleotide
  source 1..1737: mol_type = other DNA
gaggtgcaattgctggagagtggaggtggacttgttcaacctggaggatctcttcggctctcatgtgcggcttctgggttcacgttcagctcctatgccatgtcctgggttagacaggctccaggaaagggattggagtgggtgtcaggaatcagtgggagcggcgggtttacctattatgctgacagcgtgaaggggaggttcactatcagcagagataacagcaagaacaccctgtacctgcaaatgaattcccttcgggctgaggacaccgcagtgtattactgcgccaagcccccacggggatataactatggaccctttgactactggggccagggcacactggttaccgtgagctccgcctcaactaagggaccttctgtgttccctttggcaccatgttctcggagcactagtgagtccaccgccgctctgggatgtttggtcaaagattactttcccgaacctgtgaccgtaagctggaactccggggcgctgacatcaggagtgcatacgtttcctgccgtgttgcaaagcagtggtctctacagcctgtcctcagttgtgaccgttcctagttcatccctgggcacgaagacatacacctgcaacgtggatcataagccatccaataccaaagtcgacaagagggtggagagcaaatacggacctccatgtcctccatgccctgccccagaattcctgggaggaccatctgtattcttgtttccacccaagccaaaggatactcttatgatctcccgcacccctgaggtgacctgcgttgtggtcgatgtgtctcaggaggacccagaggtgcagtttaattggtacgttgatggcgtagaggttcataacgcaaaaacaaagcctagggaggagcagtttaactcaacttacagggtggtaagtgtcttgacagtcctgcaccaggactggctgaacgggaaagaatacaagtgtaaggtgtctaataagggtctgcctagcagcattgaaaagaccattagcaaggccaaaggtcagccgagggagcctcaagtttatactttgcccccttcccaggaagagatgacgaaaaatcaggtctctctcacctgtctggtgaagggcttctacccatcagacatcgccgtggagtgggagagcaatggccagccagagaataattacaagactacaccccccgtccttgatagcgacggctccttttttctgtactctcggctgacggtggacaagagtcgatggcaggagggcaacgtcttttcctgctccgtgatgcacgaggcattgcacaaccattacacccagaagtccctttcactgtcattgggagctggaggcggtggatctggaggaggtggaagtggaggaggaggatctggaggcggtggttctggagctccacttaaaattcaggcctattttaatgagacagcggacctgccctgtcagtttgcaaattctcagaatattagcctcagtgaactggtcgtagtgtggcaggatcaggagaacctcgtactgaacgaagtgtatcttggcaaagaaaagttcgatagcgtccattcaaagtacatgggcagaacttcctttgacagtgattcatggacccttaggctgcacaacctgcagattaaagataagggcctgtaccagtgcataattatccacaaaaaacccaccggaatgataagaatccaccagatgaattccgaactgtcagtgctt

SEQ ID NO: 1096 - DNA, 1737 bp, synthetic construct
  misc_feature 1..1737: note = sugemalimab antibody heavy chain -CD86 IgV-Q25V/F33V/H90I polynucleotide
  source 1..1737: mol_type = other DNA
gaagtgcaattgctcgagtctggtggaggactcgttcaaccaggaggatcacttagactgagctgcgccgcatcaggattcaccttcagctcatatgctatgtcctgggtgaggcaggctcccggaaaagggttggagtgggttagtggtattagcgggagtggcgggttcacttattatgcagacagtgtgaagggcagattcactatctccagggacaattccaaaaacaccctctatctgcagatgaatagccttcgcgcagaagacactgccgtgtattattgcgcaaaaccaccaagaggctacaactatggacctttcgattattggggccagggcactctggtcacagtctctagtgcctctaccaagggcccgagcgtatttcctcttgcgccttgcagcaggagcacctcagaatctactgcagctctgggttgtctggtgaaagactacttccctgaaccagtgacagtgagttggaattcaggcgccctcacatctggcgtgcacacctttccagcggtgctgcagtccagtggtttgtattctctttccagcgtagtgaccgtccccagttcttcccttgggacgaaaacctatacctgtaacgtcgatcataaaccaagcaacaccaaggtagataaaagagtggagtccaagtacgggcccccatgtccaccatgtccagcacctgagttcctcggaggaccgtccgtgttcctctttccccccaagcctaaggacacactcatgatttctagaactccggaagtgacctgcgtggtggtagatgtgtctcaggaggaccctgaggtgcaatttaattggtatgtcgacggggtggaggtgcataatgccaaaaccaagcccagggaggagcagtttaatagtacttacagggttgtcagcgtcctgaccgtccttcaccaagactggctgaatggcaaggaatataaatgtaaggttagcaacaagggcctcccctcctctatcgagaaaactatctcaaaggccaaaggccagcctagagagccacaggtgtatacccttcctccctctcaggaagagatgaccaagaaccaagtcagtctgacatgcctggtcaagggtttttacccatcagacattgctgttgagtgggaaagcaatggccagccagaaaataattacaagacaaccccgccagtcttggattcagacggatctttcttcctgtattcaagactgacagtggacaagtcaaggtggcaagagggaaacgtgttttcctgttccgtgatgcacgaggctttgcacaatcattatactcagaaaagcctgagtctcagtttgggtgcaggtggaggcggaagtggtggaggtggatctggaggaggaggatcaggaggaggaggaagcggagctccactgaaaatccaggcctatttcaatgagacagctgatcttccctgtcagttcgccaactcacaaaatgtgagtctttcagagctggtggtcgtttggcaggaccaggaaaatctggtgctgaatgaagtgtatcttggcaaggaaaagttcgactccgtgcattcaaagtacatgggacgaacttccttcgatagcgatagctggaccctgagattgcataacctgcagatcaaggataaagggctttaccagtgtattatcatccataagaaacccacgggaatgattcggattcatcagatgaatagcgagctgtcagtcctg

SEQ ID NO: 1097 - DNA, 1737 bp, synthetic construct
  misc_feature 1..1737: note = sugemalimab antibody heavy chain -CD86 IgV-Q25I/F33L/H90V polynucleotide
  source 1..1737: mol_type = other DNA
gaagttcaattgctggaatctgggggtggactcgtgcaacctggaggtagcttgagactcagttgtgctgccagtggcttcacattttcctcttacgccatgagctgggtcagacaggcacctggcaaaggactggagtgggtcagtggcatctccggttccgggggtttcacatattatgccgactcagttaaggggcgatttacaatctctcgcgacaacagtaaaaacaccctgtatctccagatgaatagcctgcgggcagaagacacagcagtatactactgcgctaagccacccagggggtacaactacgggccttttgattattgggggcaggggacccttgtaacagtttcatccgccagcaccaagggtcctagtgtttttccactggccccttgttctaggagtacatccgagtcaactgccgccctcgggtgtctggtgaaagactacttccctgaacccgtgacggtctcatggaactctggcgccctcacatccggagtgcacacattccccgccgtcctgcagtcatctgggctgtattctttgtcttccgttgttactgtgccatcatctagccttgggacaaagacctacacatgtaacgtcgaccacaaacctagcaatactaaggtcgacaaacgcgtcgagtccaaatatggtccgccttgcccaccatgtcctgctccagaattcctcggcgggccttctgtgttcctcttccctccaaagccgaaggacaccctgatgataagccggacaccagaggtgacgtgtgtcgttgtcgatgtatcccaggaggacccggaggtgcagttcaactggtatgtggacggcgtcgaggtacacaacgccaaaactaaaccccgcgaggaacagttcaactcaacataccgggtggtcagcgtgctcactgtcctgcaccaggattggctgaatggtaaggaatataaatgtaaagtctcaaacaaaggcttgccctcaagcatcgaaaaaaccatcagtaaagccaagggtcagcctcgagagccacaggtatataccctccctccctcccaggaagaaatgacgaagaatcaagtttctttgacctgcctggtgaaaggattctacccttctgatatcgccgtcgagtgggaatccaacgggcagcctgaaaacaattacaagacaactcctcccgtgcttgactccgatggatccttttttctctactcacggttgacggtggacaaatccagatggcaggaggggaatgttttcagttgttccgttatgcacgaggcattgcacaatcactatacccagaaaagcctgtcactcagcttgggtgcaggaggtggaggttctggcggcggtggttcaggtggtgggggtagtggtggaggaggctctggagctccactgaagattcaggcttactttaacgaaactgccgacctcccatgtcagtttgctaactcccagaatatctccctgagcgagctggtcgttctgtggcaggaccaggaaaatctggtactgaatgaggtgtatttggggaaggaaaagttcgattctgtccacagcaaatatatgggaagaacctctttcgactccgactcttggactctccgcctgcacaatctgcagattaaagataaaggcctgtatcagtgcatcattgtgcacaagaagcccaccgggatgatcaggattcaccagatgaatagtgagctgagcgtgctg

SEQ ID NO: 1098 - DNA, 1737 bp, synthetic construct
  misc_feature 1..1737: note = sugemalimab antibody heavy chain -CD86 IgV-Q25V/F33L/H90V polynucleotide
  source 1..1737: mol_type = other DNA
gaagttcaacttcttgagagtggcgggggattggtacaacctgggggttcactgaggctctcatgtgccgccagcggcttcaccttcagtagctacgcaatgagctgggtgagacaagcaccaggaaaagggctggaatgggtgagcggaattagcggatcaggtggtttcacctattacgccgactctgtgaaggggaggttcacaatcagccgggacaatagtaagaacactctctaccttcagatgaatagcctgagggcggaagacactgcagtgtactattgcgcaaagcctccaaggggctacaactatgggccgtttgactattggggtcagggtacactggtgaccgtcagtagtgcttcaacaaagggaccttccgtctttcctctggccccatgcagccggagcacttcagagtcaactgctgccctgggctgtctggttaaggactacttcccagagcctgttaccgtgtcttggaattccggagccctcacctctggcgtccacacatttcccgccgtgctgcagtctagtggactgtatagtctgtccagtgtggtgactgttccttcaagctctctggggaccaaaacctatacttgtaatgtggaccacaagccaagcaacacaaaggtggataagcgcgtggaatctaaatacggtccaccttgtcctccatgccctgctcccgaatttctggggggaccttccgtatttcttttcccgccaaaacccaaggatacactgatgatctcacgcactcccgaagtgacatgcgtggtcgtggacgtaagccaggaagatcccgaagtgcagttcaactggtacgtggacggggttgaggtgcataacgcaaagacaaagcctcgggaagaacagttcaacagtacatatcgggtggtttctgtgctgactgtcctgcaccaggactggctgaacgggaaagagtacaaatgcaaggtctcaaacaaaggactcccgagctctattgagaaaacgatatcaaaggccaaaggccaacccagagagccacaggtttatacactgccaccatcccaggaggagatgactaagaaccaggtgtcactcacctgccttgtgaaaggattttatccatccgatatcgctgtcgagtgggagtctaacgggcagcccgaaaataactacaaaactacaccccccgttctcgatagcgacgggagctttttcctgtactctcggctgactgtggacaaaagcaggtggcaggaaggcaacgtcttttcttgtagtgtcatgcatgaggctctccataaccattatacacagaaatctctgagcctgtctcttggagcaggcggtggtggttctggtggtggtggatcaggtggaggaggaagtggcggtggcggatctggtgcaccattgaaaattcaggcctattttaacgagacggcggacttgccttgccagtttgccaacagccagaacgtttctctgtccgaattggtggtgctgtggcaggaccaggaaaacctggtcttgaacgaggtgtacttgggaaaggagaagtttgacagtgtgcacagcaagtacatgggccgcaccagcttcgactcagattcttggacactgcggcttcacaatctccaaatcaaggacaagggtttgtaccagtgtattattgttcacaaaaagcccacaggcatgataagaatccatcagatgaatagtgagctgagcgttctc

SEQ ID NO: 1099 - DNA, 1737 bp, synthetic construct
  misc_feature 1..1737: note = sugemalimab antibody heavy chain -CD86 IgV-Q25I/F33V/H90V polynucleotide
  source 1..1737: mol_type = other DNA
gaagttcaactgctggagagtggaggaggtctggttcaacctggtgggtcactgaggttgagttgtgccgccagcggatttactttctcctcctacgccatgtcttgggtgagacaggcccctggcaaaggtctggagtgggtgtccggaatttccggaagcgggggattcacatactacgccgatagtgtgaaaggaagatttacaatctcaagggataattccaaaaacacactctaccttcagatgaactccctgagggccgaggacacagccgtgtactactgcgcaaaacctccaaggggatataattacgggccatttgattactggggacaaggcaccctggtcaccgtttcctctgcatccaccaaggggccatccgtttttccactcgctccctgctcacggagcacgtcagagtctacagcggctcttgggtgtctggtgaaagactacttccctgaaccagtgactgtgagctggaattccggagcattgacatctggcgtgcacacctttcccgcagtgctccagtctagcgggttgtacagtctgagcagcgttgtgaccgttcccagctcttcactgggaactaagacatatacctgtaacgtcgaccacaagccttctaacaccaaggtggataagagagttgaatcaaagtacggacctccttgtccaccctgtccagcacccgagtttctgggcggaccttccgtgttcctgtttccacccaagccaaaggataccctcatgatatctagaacccccgaagtgacttgtgtggtcgtcgatgtcagccaggaggatccagaagtccagtttaattggtatgtcgatggcgtcgaggtccacaacgccaaaaccaagccaagggaggagcagtttaacagtacatacagggtagtttccgtactgactgtcctccaccaggattggctgaatggtaaggagtacaagtgcaaagtgtccaacaagggcttgccgtcatctatcgagaaaacaatcagcaaggccaaagggcaaccacgagaaccacaggtgtatacattgcccccaagccaggaggagatgacaaagaatcaggtgagcttgacatgcctggtcaagggattttacccctccgatattgcggtggagtgggaatccaacgggcagcctgagaataactacaagactacacctcctgtcctggattctgatggtagtttttttctctacagtagattgacagtggacaagagccggtggcaggagggtaacgtgttttcttgttccgtgatgcacgaggccctccataaccactacacacagaaaagcctcagtctgagccttggggctggaggaggtggttctggtggcggaggatcaggcggtggcggatctggaggaggtggatcaggggctccgctgaagatccaggcctatttcaatgagactgccgacctgccgtgccagtttgccaattcacagaacattagtctttccgaactcgtcgttgtctggcaggatcaagagaatctggtcctgaatgaagtctacctgggcaaggagaagtttgattctgtccactccaaatacatgggacgcacatcttttgattccgactcttggaccctgaggctgcataatctccagatcaaagataaaggcctgtatcagtgcattatagtgcacaaaaaacccactggcatgattaggattcatcagatgaacagcgagctgagtgttctg

SEQ ID NO: 1100 - DNA, 1737 bp, synthetic construct
  misc_feature 1..1737: note = sugemalimab antibody heavy chain -CD86 IgV-Q25V/F33V/H90V polynucleotide
  source 1..1737: mol_type = other DNA
gaagtacaactgttggaatcaggtggcggtcttgtccagccaggaggtagtctcagactgtcatgtgctgcctccggatttacctttagctcctatgctatgtcttgggtgcggcaggcaccagggaagggattggagtgggtaagtggcattagcggcagcggaggcttcacatattacgccgacagcgtgaaaggccgattcacaatttcaagggataactctaagaacaccctgtatctccagatgaacagtctcagggccgaggataccgcagtttactactgcgccaagcccccaagaggctacaattacggcccatttgattattgggggcagggaaccctggtgacagtctcatctgcttctaccaaagggccctccgtttttcctctcgctccatgctcccgcagtacatccgagagtacagctgctttgggatgcctcgtgaaggactacttcccggagccggttaccgttagctggaatagcggagctctgaccagtggggtgcatacgtttcccgcagttctccagagttccgggctctattctctgagctcagtcgtgaccgttccctcatctagcctgggcacaaagacatacacttgcaacgtcgaccacaaaccctcaaacaccaaggttgacaaaagagtggagtccaaatatggacctccatgcccaccatgtccagcacctgagttcctcgggggtccaagtgtctttctcttcccaccaaaaccaaaggacacgctcatgatttctaggacgcccgaggtaacctgtgtggtagtggacgtttctcaggaggatcctgaggttcagttcaattggtacgttgacggcgtggaagtgcacaacgccaaaaccaaaccacgagaggagcagttcaactccacctatagagtggtgtctgtcctgaccgtgcttcaccaggactggctgaatgggaaggagtacaagtgtaaagtgagcaacaagggactcccgtctagcatcgagaagaccatctctaaggctaaaggccagcctcgggagcctcaggtttatacgctgcctcctagccaggaagagatgaccaagaaccaggtgtctttgacctgcctggtcaaaggtttctacccctccgacattgccgtcgagtgggagtctaacggacaacctgaaaacaactacaagaccacacccccagtccttgactcagatgggagcttcttcctgtattcaagactcaccgtggataaatctcggtggcaggagggcaacgtctttagttgtagcgtaatgcacgaagcactgcataatcattacacacagaagtcattgtccctgagtttgggagcaggtggaggaggatcaggtggcggtggatctggtggaggaggatctggaggaggcggtagtggagctcctctgaagatccaggcctatttcaatgaaaccgctgacctgccttgtcagtttgccaactcccagaacgtcagcctgtccgaactggtggtcgtttggcaagatcaagaaaatctggtgctcaatgaagtgtatctgggcaaggagaaatttgacagcgtccacagcaaatacatgggaagaacatcttttgattccgattcttggacacttcggctccataacctgcagataaaggacaagggactgtaccagtgtattatcgtccataagaagcccacaggaatgatccgaatccatcaaatgaacagcgagctcagcgtgctg

SEQ ID NO: 1101 - DNA, 1737 bp, synthetic construct
  misc_feature 1..1737: note = sugemalimab antibody heavy chain -CD86 IgV-A13L/Q25I/F33L/H90I polynucleotide
  source 1..1737: mol_type = other DNA
gaagttcaacttttggaaagtggcggtggactcgtgcagcctggtggttcactcaggctcagttgcgccgcaagtgggtttacgttctcaagctatgcaatgtcttgggtgagacaagcaccaggtaagggactggagtgggttagtggtatatcagggagcggaggattcacttactacgccgactcagtcaaggggcggttcaccatttccagggacaacagcaagaataccctctacctgcaaatgaacagtttgagggctgaagatacggcagtgtattattgcgccaagccgcccagggggtataattatggcccattcgattactggggccagggaactctggtgactgtgtcatccgctagtactaaaggaccttctgtttttccactggctccctgcagccgcagtacatcagagagcactgcagcactgggatgccttgtgaaggattactttcctgagcctgtgaccgtgtcatggaacagcggcgcactgacaagcggtgtgcacacctttcctgcagtcctccagtcctcaggactgtactccctcagcagcgttgtgactgttccgtcaagttcactgggtaccaaaacttacacctgcaatgtcgatcacaagcccagcaatacaaaagtggataagagggtggaaagcaagtacggacctccatgtcctccttgtcctgcaccagagttcctgggagggccttcagtgtttctctttccccctaagcctaaagatactctcatgatcagccgcactccggaggttacttgcgttgtggtagatgtttctcaggaagatcccgaggtccagttcaattggtatgtggacggcgtggaagtgcacaacgctaagactaaaccccgagaagagcagttcaacagcacgtatagagtagtcagtgtgctgaccgtcctgcatcaggactggttgaacggtaaggagtacaaatgcaaggtgagtaacaaaggtctgcctagttccattgaaaaaacaatatctaaggctaagggccagcctagagagccacaggtgtacacattgcctccgtcacaagaggaaatgaccaaaaatcaggtgtccctgacatgcttggttaaggggttctacccaagcgacatcgcagtggaatgggagagcaacggtcagcccgaaaacaactacaagaccacacctcccgtcctggatagcgacggttccttctttttgtactctagactcaccgttgacaagtcaagatggcaggagggaaacgtctttagctgttccgtgatgcatgaggcattgcataaccattatactcagaagtctttgagtctgagtctcggagcaggaggtggaggaagtggtggcggaggatctgggggaggaggatcaggaggaggaggctcaggcgctccactgaagatccaggcctactttaacgagacactggacctcccatgtcagtttgccaatagccagaatatcagcctgagtgagctggttgttctgtggcaggaccaagagaacctggtactcaatgaagtttatctgggcaaggagaaattcgactcagtacatagcaagtacatgggccggacatcttttgattccgatagctggacactgagactccacaatttgcagataaaggacaaaggactgtaccagtgcatcattatacacaagaagccgacaggtatgattcgcatccaccaaatgaactcagagttgtctgtgctg

SEQ ID NO: 1102 - DNA, 1737 bp, synthetic construct
  misc_feature 1..1737: note = sugemalimab antibody heavy chain -CD86 IgV-A13I/Q25I/F33L/H90I polynucleotide
  source 1..1737: mol_type = other DNA
gaagttcagctgctcgaaagtggtggaggacttgtgcaacctggtggtagtctgaggctgtcatgtgctgcttcaggattcaccttcagctcttatgctatgtcatgggtaaggcaggccccagggaagggtttggaatgggtgagcggtatatctggctctggaggcttcacgtactacgcggacagcgttaagggaagatttactatttcccgggacaatagcaagaatactctttacctccagatgaacagcttgcgcgcagaagataccgccgtctactactgcgctaaaccaccacgcggttacaattatggtccgtttgactattggggacagggtactctggtgacggtttcttctgcttccaccaagggaccctctgtgttccctctggcaccgtgtagcagaagcacctcagagtccaccgcagctctcgggtgtctcgtgaaggactacttcccagaaccagttactgtgagttggaattccggagccctgacctccggagtgcataccttccctgccgtcctgcagagctccggactgtacagtctgtcctccgtcgttaccgttccatccagctccctggggacaaaaacttatacctgtaacgtggatcacaagccctccaacactaaggtcgataaacgcgtagagtccaagtacgggccaccttgccctccatgtcctgctccagaatttctggggggaccttccgtgtttctttttcccccaaaacctaaggatacactgatgataagccggactcccgaggtgacatgcgtggttgtggacgtcagccaagaagatcccgaggtccaattcaactggtatgtggacggtgtggaagtgcataatgccaagactaaacccagagaggagcagttcaacagtacctacagggtggtgagcgttctgactgttctccatcaggactggctgaatggtaaggaatataagtgcaaagtcagcaacaaggggttgcctagctccattgagaagacgatctctaaggcaaagggtcaaccccgggaaccccaggtctacactttgccccctagccaggaggaaatgaccaagaaccaggtttccttgacgtgtctggttaagggcttctacccttccgacatagccgtggaatgggagagtaatgggcagccagaaaataattacaagacaaccccgcccgtactcgactctgatggctccttttttttgtactctcggctgacggtggataagtctaggtggcaggaagggaatgtgtttagctgcagtgtgatgcacgaagcactgcacaatcactacacacagaagtctctgagtttgagtcttggtgctggaggaggaggaagtggtggcggaggaagtggtggtggtggaagtggaggaggtggctctggcgctcctctcaaaattcaagcctacttcaacgagaccatcgatttgccatgccagttcgcaaactcacagaacattagcctgagcgagttggtggttctgtggcaggatcaggagaacctggtcctgaatgaggtgtatctgggtaaggaaaaatttgactctgtacattccaagtacatggggcgcacctccttcgactctgattcctggactctgcgccttcacaatctccagatcaaggacaagggactgtatcaatgtattatcatccataagaaacccactggaatgattagaatccatcagatgaactcagaattgtccgtcctt

SEQ ID NO: 1103 - DNA, 1737 bp, synthetic construct
  misc_feature 1..1737: note = sugemalimab antibody heavy chain -CD86 IgV-A13L/Q25V/F33L/H90I polynucleotide
  source 1..1737: mol_type = other DNA
gaagttcaactgctggaaagtggaggagggttggttcagcctggtggcagcctcagactcagctgtgccgcaagcggattcaccttttccagttatgctatgtcatgggtaagacaggcacctggcaagggccttgagtgggtgagtgggatttccgggagcggcggtttcacatactacgctgattctgtgaagggccgctttaccatcagccgcgacaattcaaagaataccttgtatctgcaaatgaatagcctgcgagctgaggacaccgctgtctattactgcgccaagcctcctcgcggttataattacggaccgttcgactattggggacaagggacgctggtcaccgtttcatcagccagtacaaagggcccaagtgtctttcctctcgccccctgttcccgatctaccagcgaatctaccgctgctctggggtgccttgtgaaagattattttccagaaccagtgaccgtgagctggaacagcggggctctgactagtggcgtgcatacatttcccgcagtcctccagagctctggcctctactccctgtctagcgtcgtgacagtccccagctcctctttggggacgaagacatacacttgcaatgtagaccataagccttcaaataccaaggtggacaaacgcgtggaatcaaaatatggtccaccttgtcctccttgtccagctcccgaatttcttggaggccccagtgtgtttctgtttccacctaaaccaaaggacaccctcatgatttccagaactcccgaggtcacttgtgtggtggttgacgtttctcaggaagacccagaagtgcagttcaactggtacgtggacggtgttgaggtccataatgcaaaaacaaagccacgagaggagcagttcaacagcacttatagggtcgtctccgtgctcaccgtgcttcatcaggattggctgaatgggaaggagtacaagtgtaaagtaagcaacaagggcctgccgtcttccattgagaaaaccatcagcaaggccaaaggtcagccccgggaacctcaggtgtataccctgccaccatctcaggaagagatgacgaagaaccaagtgtccttgacttgtttggttaagggattctaccccagcgatattgctgtcgaatgggagtctaacggacaaccagagaacaactataaaacaaccccgcctgttctggatagcgacgggtccttctttctgtacagcaggttgaccgttgacaagtcaagatggcaagagggcaatgtgttctcttgttccgtgatgcatgaagctcttcacaatcattacacacagaagagtcttagtctttcattgggagctggaggcggtggatctggaggaggaggatctggaggtggaggatcaggcggaggaggttctggggctccactgaagattcaggcctactttaatgagacactggacttgccctgtcaattcgctaattctcagaacgtttccctgagtgaattggtcgtgttgtggcaggaccaggagaatcttgtgctgaatgaggtgtacctgggcaaggagaagttcgatagtgtgcactctaaatatatgggtagaacatccttcgactccgactcttggaccctgagactgcataatttgcaaataaaagataagggactctaccaatgcataattattcataagaagcccacaggtatgatacggattcaccagatgaactctgagctgagtgtgctg

SEQ ID NO: 1104 - DNA, 1737 bp, synthetic construct
  misc_feature 1..1737: note = sugemalimab antibody heavy chain -CD86 IgV-A13I/Q25V/F33L/H90I polynucleotide
  source 1..1737: mol_type = other DNA
gaagttcagttgttggaatctggagggggtctcgtccaacctggaggtagtctgcgattgagctgtgctgcatctgggttcaccttttcatcatatgctatgagttgggtcaggcaagctcccggtaaaggtttggagtgggtttctggtatcagcggatcaggtggctttacctattacgccgattctgttaaaggccggttcacaataagcagggacaacagcaaaaataccctgtacctgcaaatgaacagtcttagagcagaggacacagctgtgtactattgtgctaaacccccacgagggtataattacgggccgtttgactactggggacagggaactcttgtgactgtgtccagtgcatctacgaaaggcccaagcgtgtttcctttggcaccctgctcaagatcaacctcagaatctacggccgctctcggctgtcttgtcaaagattacttcccagaaccggtcactgtgtcctggaacagtggagctctgaccagcggagtgcatacattccctgccgtcctgcagtccagcggcctttacagtctttcttcagttgtgacagtgccgtctagctccctggggacaaagacttacacttgcaacgtggatcataaaccgtcaaatactaaggtagataagagagttgaaagcaaatatggcccaccttgtcctccatgccctgcaccagagttcctcggtgggccttcagtgttcttgttccccccaaagcctaaggataccctcatgatttctagaacccccgaagttacttgcgtggtggtcgacgtgagccaggaggaccctgaggttcagttcaactggtatgtcgacggcgtggaagtccacaatgccaagacaaagccaagggaagagcagtttaactcaacttatcgagtggtgtcagttctgaccgtcttgcatcaggattggctgaatgggaaggagtataaatgtaaggtaagcaacaagggcctgccctctagcatcgagaaaacaattagtaaggcaaaaggccagcctagggagccacaggtgtatacccttccccccagccaagaagaaatgaccaagaaccaggtgtctctcacctgcctggtaaagggattctacccatccgacatcgccgtagagtgggaaagcaacgggcagcccgagaacaactataaaaccacacctcccgtcttggactcagacggcagcttctttctgtactccagactgacagtggacaagtccagatggcaagagggcaacgttttttcttgttctgtaatgcacgaagctcttcacaaccattatacccaaaagagcctgtctctgtccctgggagcaggagggggaggaagtggtggaggaggatcaggtggtggcggaagtggaggaggtggatctggagcacccctcaaaattcaggcctactttaacgagaccattgacctgccttgtcagtttgccaacagccagaacgtgagcctgtccgaacttgtagtgttgtggcaggaccaggagaatttggtgttgaatgaggtctatctgggaaaggaaaaattcgactcagtgcactccaagtacatgggcaggacatcatttgattccgactcctggactctgcggttgcataacctccagatcaaagataagggcctgtaccagtgcatcatcatccacaaaaaacccactggcatgatcaggattcaccaaatgaacagtgaactgtcagtgctg

SEQ ID NO: 1105 - DNA, 1737 bp, synthetic construct
  misc_feature 1..1737: note = sugemalimab antibody heavy chain -CD86 IgV-Q25I/F33L/I89L/H90I polynucleotide
  source 1..1737: mol_type = other DNA
gaagtacaacttcttgaaagcggaggaggattggtacagcctggtgggagcttgaggctgtcttgtgccgcctctggtttcacattctcttcttacgctatgtcctgggtcaggcaggcacctggaaagggacttgagtgggtttctggcatttccggctctggcggattcacttattacgctgattctgtaaaggggcggttcactatttccagagacaacagtaagaacaccctgtatctgcagatgaattcactgcgggccgaggatacggctgtgtattattgcgcaaagccgccccgcggctataattacggacccttcgattattgggggcagggaactctggtcacagtgtcttccgccagcaccaaaggcccttctgtgttccccctcgcaccatgttctaggagcacatcagagtccacagccgctctggggtgtctggttaaagattatttccccgaacctgtcaccgtctcctggaattcaggggctcttacatctggagtccacacctttcccgccgttctccagagctcaggtctctattccctgagctccgttgtgactgtgccgagtagctcactgggaaccaaaacctatacgtgtaacgtggaccataagcccagcaacacgaaggtggacaaacgcgtcgaatccaagtatggccctccatgtccaccttgtccagcccctgaattcttgggaggcccttccgtctttctgttccctcccaagcccaaagatacactgatgatctctagaacccccgaggttacttgcgttgtcgtcgacgtgagtcaggaagaccccgaggtccagtttaattggtacgtcgacggagtggaggtgcacaacgcaaagactaagccccgggaagaacagttcaatagcacatatagggtggtgagcgtgctgacggttttgcatcaggactggttgaatggcaaagaatacaaatgcaaggtcagcaacaaggggctgccgtctagtatcgaaaagactatttcaaaagctaaaggccaaccaagggaaccgcaagtgtataccctgccgccaagtcaggaggaaatgactaaaaatcaggtgtctctgacctgcctggtgaaggggttttacccttccgacatcgccgtggagtgggagtccaacggacaaccggaaaacaattacaaaactactccacccgtgctcgattctgatggctccttctttctgtactccaggctcaccgtcgacaagagccggtggcaagagggaaatgttttcagctgtagtgtgatgcacgaggccctgcacaaccattacactcagaagtctttgtctctgagtttgggcgctggaggaggaggaagtggtggaggaggatccggaggaggaggaagtgggggaggtggtagtggcgcaccactgaaaattcaggcctactttaacgagacagctgatctcccatgtcagtttgcaaatagccagaacatttccctgtccgagttggtcgttctgtggcaggaccaggaaaacctggtgctgaacgaggtgtaccttggcaaagagaaattcgatagtgtgcactctaaatacatgggcaggacctcattcgacagcgattcctggaccctccgcctccataatctgcagattaaggacaaagggctttatcagtgtatactgatacacaaaaaacccaccggaatgattcggattcaccagatgaatagcgagttgagtgtgctc

SEQ ID NO: 1106 - DNA, 1737 bp, synthetic construct
  misc_feature 1..1737: note = sugemalimab antibody heavy chain -CD86 IgV-Q25I/F33L/M60R/H90I polynucleotide
  source 1..1737: mol_type = other DNA
gaagtacagttgttggaatcaggtggtggtctggtgcaacctggcggttcactgaggctctcttgtgccgctagcggctttacattctcctcttacgctatgtcttgggtgagacaggcccctggtaagggactcgaatgggtgagtggaattagcggaagtgggggatttacctattacgctgatagtgtgaaagggcgcttcacaatttctcgagacaatagtaaaaatacactgtatctgcaaatgaattcattgcgagctgaagacaccgcagtctactactgtgccaaacctcctaggggttacaactacggaccttttgattattggggccagggcacgcttgtgacagtgagcagtgcatcaacaaaagggcctagcgttttcccgcttgccccatgctcacggtctaccagtgagtccaccgcagccttggggtgtctggtcaaggactactttcctgagccagtgactgtgtcctggaactctggggctctcacatccggtgtgcacacatttcctgctgtgctgcaatcatccggattgtactccttgtcaagcgtcgtgactgtgccaagctctagcctcggcaccaagacatacacctgcaatgtggaccacaagccctcaaacactaaggtcgacaagcgggtggaatctaaatatggtcctccttgtccaccatgtcctgctccagagttcttgggcggccctagcgtgtttctctttccccctaaacctaaggatactctcatgatatcccggacccccgaggttacatgcgttgtagttgacgtctcacaagaagatccggaagttcagtttaattggtacgtcgatggagtagaggtgcacaatgccaaaactaagccacgggaggaacagttcaactccacttacagagtggtgagcgttttgactgtcctgcatcaggattggctgaatgggaaggagtacaagtgcaaggttagtaacaagggcctgcctagctctatcgaaaaaaccatctcaaaagccaaagggcagccaagagagccccaggtgtataccctcccaccaagccaagaggagatgactaagaatcaagtctctctgacctgccttgtcaagggattttaccctagcgacatagccgtggagtgggaaagtaatggtcagccagagaataactacaagactacaccgcccgttttggacagtgatggaagcttctttctctattccagattgactgttgacaagagcagatggcaggagggaaatgtgttctcatgttcagtgatgcacgaagccctgcataaccactacactcagaaatccctgtcattgtcactcggagctggaggtggtggatctggaggcggtggaagcggaggtggaggttctggaggaggaggaagtggagcccctttgaaaatccaagcctatttcaacgaaacagctgatctgccctgccaatttgcgaactcccaaaatattagcctctctgaactcgtggtgctgtggcaggaccaggagaatctggtgctcaacgaggtataccttgggaaggaaaagtttgattctgtgcattcaaagtaccgcgggcggaccagttttgacagtgatagttggacacttcgcctgcacaacctccagatcaaggacaagggcttgtatcagtgtataattatccacaaaaagccaaccggaatgatcagaattcaccagatgaacagtgaattgtccgttctg

SEQ ID NO: 1107 - DNA, 1737 bp, synthetic construct
  misc_feature 1..1737: note = sugemalimab antibody heavy chain -CD86 IgV-Q25V/F33L/I89L/H90I polynucleotide
  source 1..1737: mol_type = other DNA
gaagttcaactcttggaatctggaggaggcttggtacagccaggaggcagtttgagactgagttgtgccgcctcaggctttaccttctctagctacgccatgagctgggttaggcaggcacccggtaaaggactcgaatgggtgtcaggaatctctgggagcggaggtttcacctattacgctgatagtgtgaaggggagatttacaatctcaagagacaactccaaaaatacactttacttgcagatgaacagcctgagagccgaagatacagctgtatactactgcgctaaaccgccacgcggttacaactatggcccttttgactactggggacagggtaccttggtgacagtatccagcgctagcacaaagggtcctagcgttttcccacttgccccatgttctcgctcaaccagcgagagtacagccgctctgggctgtcttgttaaggattatttcccagagccagtcaccgtgtcctggaactcaggcgcactcacttccggagtgcacacctttccagctgtactgcagagttccggactgtactcactgtcttctgtggtgacggtgccatccagctctctgggcactaagacatacacctgcaatgtcgaccataagcccagcaataccaaggttgataagagggtcgaatccaagtacggcccaccttgtccaccatgtcctgcccctgaattcttgggtgggcctagtgtgtttctgtttccccccaaacccaaagacacactcatgatatcacgcacccccgaagtaacttgtgttgtcgtggatgtctctcaggaagacccggaggtgcagtttaattggtacgtggacggagtggaagtgcataacgcaaagaccaaaccccgcgaggagcagtttaatagcacgtacagagtggtgagtgtgttgacagtccttcaccaagactggctgaatggaaaggagtacaaatgcaaggtctctaataaaggcctgccttcaagcattgagaagaccattagcaaagctaaaggccagcccagagaaccacaggtgtataccctgcccccaagtcaagaagagatgaccaagaaccaggtctcactgacttgccttgtgaaaggcttttatccatcagatatcgccgtggagtgggagtcaaatggacagccagagaataactacaagaccacccctcccgtgttggactcagacggctcttttttcttgtattctcggctcactgtggataaaagccgctggcaggagggcaatgtgttcagctgtagcgtgatgcatgaagcacttcataaccactatacccagaaatccctctccctttcattgggagcaggaggtggaggttcaggtggtggaggttcagggggtggaggttctggaggaggtggttctggtgcacctctgaaaatccaggcatactttaacgagactgccgaccttccatgccagttcgctaatagtcagaacgtgtccctcagcgagctggttgtgctttggcaggatcaggagaatctcgtcctgaacgaggtttatctgggaaaggagaagttcgactccgtgcattcaaaatacatgggcagaacctcctttgattctgacagctggaccctgcgcctccacaatcttcagataaaggataaaggactgtatcagtgcattctgattcataagaagccgaccgggatgatcaggatacaccagatgaactccgaattgagcgttctt

SEQ ID NO: 1108 - DNA, 1737 bp, synthetic construct
  misc_feature 1..1737: note = sugemalimab antibody heavy chain -CD86 IgV-Q25V/F33L/M60R/H90I polynucleotide
  source 1..1737: mol_type = other DNA
gaagtccaacttcttgaatctggaggcggattggtgcagcctggaggtagccttagactgtcatgtgctgcctcaggatttacattttcctcatatgctatgagctgggtcagacaggctcctgggaagggtctcgagtgggtctccggaatcagtgggtccgggggattcacttactatgctgactcagttaaggggagattcaccatctccagggacaacagtaagaataccctttacctccagatgaacagcctgagagcagaggatacagccgtatactattgcgcgaagcctccaaggggttataattatggtccgttcgattactggggacaggggactctcgttacagtgtcttctgcttctacgaagggcccaagtgttttccctctggccccttgctccaggtctacttccgagtctacagcggctctgggttgcctggtgaaggactactttcccgaacctgtgaccgtttcatggaatagtggcgctctgacttctggagtccacacctttcccgccgtgttgcagtccagcggtttgtactcattgagctcagtcgtgactgttcccagctcctcccttggcacaaaaacctacacttgtaatgtggatcataaacctagcaatacaaaggtggataagagagtggagagtaagtacggtccaccttgtcctccttgtcccgcacctgagtttctgggcggacccagtgtcttcctgtttccccccaaacccaaagatactctgatgatctcaagaacacccgaggtgacatgcgttgtggtggatgtttctcaggaggatccggaagtacaatttaactggtacgtggatggcgtcgaggttcataatgccaaaactaaacccagggaggagcaattcaattcaacttacagagtggtcagcgtgctcaccgtgctgcatcaggattggctgaatgggaaggagtataaatgcaaggtttcaaataagggcctgccgtcctcaatcgagaagacaatttccaaagccaaggggcagccccgagaaccacaagtctacactctgccaccttcccaagaagaaatgactaagaatcaggtgtctctcacttgcctggtcaaaggattttatcccagtgacattgctgtcgaatgggaaagcaacgggcagccagaaaacaactataagaccacccctcccgttcttgatagtgacggcagtttctttttgtactcccggctgaccgtcgacaagagcaggtggcaggaaggcaacgttttctcttgttcagtgatgcatgaagctctgcacaatcactatactcaaaagtccctgtcattgtcattgggagctggaggaggaggaagtggaggtgggggatctggtgggggaggtagtggtggaggtggaagcggagcaccactgaagattcaggcctattttaatgaaactgccgatctgccttgtcagtttgccaattctcagaacgtctctctgagcgagttggtggtgttgtggcaggaccaggaaaacctggtcctgaatgaagtgtacttgggtaaggagaaatttgatagcgtccactccaaatatagaggccggaccagttttgatagcgatagctggacactgaggctccataatctccagataaaggataaaggactgtaccaatgtattattatccacaaaaaacccaccgggatgattcgcatccaccagatgaacagcgagctgtccgtcctc

SEQ ID NO: 1109 - DNA, 1737 bp, synthetic construct
  misc_feature 1..1737: note = sugemalimab antibody heavy chain -CD86 IgV-Q25F/F33L/H90I polynucleotide
  source 1..1737: mol_type = other DNA
gaagttcagttgcttgaaagtggaggaggactggtccagccaggtggcagtcttcgcctgtcatgcgctgcatcaggcttcacattctcaagctacgccatgtcctgggtgagacaagctccaggaaagggcctggagtgggtcagtggcatctctgggagcgggggattcacatactacgccgacagcgtgaaaggtcggttcaccatatcaagagataattctaagaatacactttatctccagatgaatagtttgagggcagaggacaccgctgtatactactgcgctaagcctccccggggttataattacggtcctttcgattattggggacagggcactttggtgaccgtgtcatcagcgagtacaaaaggaccctcagtgtttcctctggcgccatgtagccggagcacatccgagagcaccgcagctctgggatgcctcgttaaggactacttccccgaacccgtaaccgtgagctggaactcaggggccttgacttctggagtccacaccttccctgccgtgctgcaatcaagtgggctgtactccctgagctccgtcgtgactgtgccaagttcctcccttgggacaaagacatatacctgcaacgtcgatcacaagccatcaaacacaaaagtggacaagcgggtcgaaagcaagtacggtcctccgtgtcctccttgccctgctcctgagtttctgggcggtccttcagtgttcttgttccctccgaagccaaaggacactctgatgatctcacggacccccgaagtcacctgcgttgtcgtagatgtgtcacaggaggatcctgaggttcagttcaattggtacgttgacggtgtcgaggttcacaatgctaaaacaaaaccacgggaagagcagtttaactctacgtacagagtagtttctgtcctgactgtgctgcaccaggactggctcaatgggaaggagtataaatgcaaagtctccaataaggggttgccttcatccattgaaaaaaccatttctaaggccaaaggccaaccacgcgagccacaggtctataccctgcctcccagccaggaggagatgactaagaatcaggtcagcctgacttgcctcgtgaaaggcttctacccctcagacatcgccgtggagtgggagagcaatggacagcccgagaacaactacaaaacaaccccccctgtgttggactccgatggaagcttctttctctacagcagactgaccgtggataagagtaggtggcaggaaggaaatgttttcagctgcagcgtgatgcacgaagccctgcataaccactacactcagaagtccctctccttgagtcttggtgctggtggcggaggaagtggaggaggtggatctgggggaggaggatctggaggcggaggatcaggagctcccctcaagatccaggcctatttcaatgagacagccgatcttccttgccagttcgctaactcacaaaacttctccctctcagagctggtcgtattgtggcaagatcaagaaaacctggtgctcaacgaggtgtacttggggaaggagaagttcgacagcgttcatagcaaatacatgggacggaccagtttcgattctgactcctggacactgagactgcataacctgcagattaaggacaaggggttgtatcagtgcatcataatacataagaaacccaccggcatgattcgaatacaccaaatgaactcagaactgtccgtactt

SEQ ID NO: 1110 - DNA, 1737 bp, synthetic construct
  misc_feature 1..1737: note = sugemalimab antibody heavy chain -CD86 IgV-Q25I/F33L/H90F polynucleotide
  source 1..1737: mol_type = other DNA
gaagtgcaacttcttgaatcaggtggaggcctggttcaaccaggaggaagtttgcgcctgtcctgtgctgcctctgggttcacatttagttcatatgctatgtcctgggttcggcaagcacctggcaagggtctggaatgggtgagtggcatatccggctctggcggattcacctattatgctgacagtgtgaaaggccgctttaccatctcaagagataatagtaagaacacgttgtatcttcagatgaatagcctgagggccgaagatactgctgtttactactgtgccaaacccccccgcggctataactacggacctttcgattattgggggcagggcaccctggtcaccgtaagttctgctagcacaaaaggcccatctgtcttccccttggcaccatgctctagatccaccagcgaaagcactgccgcactggggtgccttgtgaaagactatttcccagagcccgtgaccgtgtcctggaatagtggggcactgacctccggcgttcacactttccccgctgtcctgcagtccagtggcctgtactctctgtcctccgtcgtgacggtaccctcatcatctcttggtacaaagacctacacatgtaatgtcgaccacaaacctagtaataccaaagtggacaagagggttgaaagcaagtacggacctccttgccctccatgtcccgctcctgagttcctgggcggaccttctgtgttcctctttccgcccaaaccgaaagacaccctgatgatctctcgaacacctgaggtgacctgtgttgtggtggacgtttcccaggaggatcccgaagtgcagtttaactggtatgttgacggggtggaggtgcataacgctaaaacaaagcctagagaagaacagttcaacagcacatatagagtcgtcagcgttctgacagtgctgcatcaggattggctgaatggcaaggaatacaagtgcaaggtgtccaataagggactgccgtcatccattgagaagactatcagcaaggcaaagggacagccccgggaacctcaggtctacacattgcccccatcccaggaggaaatgactaaaaaccaggtgagccttacctgtctggtgaagggtttctatccttctgacatcgccgtggagtgggagtctaacggccagcctgaaaacaattacaaaaccactcccccagtactggattctgacggcagctttttcttgtattctcggctgacagttgacaagagcagatggcaagaaggcaatgtgttctcttgttccgtaatgcacgaggcacttcacaatcactacacccagaaaagcctttcactttcactgggagcaggaggaggaggctcaggagggggaggatctggtggaggaggttccggaggcggaggaagtggtgctccactgaagatccaggcatatttcaacgagaccgccgatctcccctgccagtttgcgaactcacagaacatatcacttagtgagctggtcgtcctgtggcaggaccaggaaaatcttgtgctcaacgaggtttacctcggcaaggagaaatttgacagtgtgcacagtaagtatatgggacggacctcctttgattccgactcttggaccctgcgcctgcataacctccaaattaaagataaggggttgtaccaatgtataatcttccacaagaaacccacaggcatgattaggatacaccagatgaacagtgaactcagcgtcctg

SEQ ID NO: 1111 - DNA, 1737 bp, synthetic construct
  misc_feature 1..1737: note = sugemalimab antibody heavy chain -CD86 IgV-Q25I/F33A/H90I polynucleotide
  source 1..1737: mol_type = other DNA
gaggttcagttgcttgaatctggaggaggacttgttcagcctggtggatcactgaggctctcctgcgcagctagcggattcacatttagctcttacgccatgtcttgggtcagacaggctcccggaaagggactggaatgggtttccggcatatctgggagcggtgggttcacatattacgccgactctgtgaaaggaagatttactatctctcgcgacaacagtaaaaataccctttacctgcagatgaacagcctgcgggccgaagacacagccgtgtattattgcgccaagccgccaagagggtacaattacggtcctttcgactattggggacagggaactctcgtcaccgtgagctctgcctccacaaaaggtccatctgttttcccgctcgccccttgcagtagaagtacaagcgaatccaccgccgcactgggctgcttggtgaaggattacttccccgagccggtgactgtgtcctggaacagtggcgccctgacgtctggagtgcacacatttcctgcagtactgcagagctcaggcctctactcactgagcagcgtggtgaccgtgccctcttccagtctcgggaccaaaacttacacatgtaacgtggatcacaagccctccaatactaaggttgataagagggtggaaagtaagtacgggccaccatgtccaccttgtcctgcacctgaatttcttggcggaccaagtgtcttccttttcccaccgaagccaaaggatactctgatgatcagcagaacgcctgaagtgacatgcgttgtggtcgatgtgtcacaggaagatcctgaggtccaatttaactggtatgtagatggggtggaggtgcacaacgcaaagaccaaaccccgggaagagcaatttaacagcacctatcgagtggtgtccgtcctcaccgtgctgcatcaggactggttgaacggcaaagaatataaatgcaaggttagcaataaaggactgccgtccagtatcgagaagaccatctcaaaagcaaaaggacaaccccgagagcctcaagtgtacacactgccacccagtcaggaggaaatgacaaagaaccaggtttcactgacatgcctggtcaaggggttctacccgagcgatattgcagttgaatgggaatccaatggacagccagaaaacaactacaagaccactccaccagtgctggattccgacggctcattcttcctttacagccggcttactgtggataaatcccgctggcaggaagggaacgtctttagttgctctgtgatgcacgaagccctgcacaatcactacacccaaaaaagtttgtctctgagtttgggtgcaggtggtggaggatctggcggaggtggatctggtggtggtggtagcggaggtgggggaagtggagctccattgaaaatacaggcgtattttaatgaaacggctgatctgccatgtcaattcgccaattctcagaatattagtctgtcagaactggtggtggcctggcaagaccaggagaacttggtgctgaatgaagtctacctgggtaaggagaagtttgacagtgttcactccaaatatatgggtaggacgtcttttgacagcgatagctggaccctgagattgcacaatttgcagatcaaagacaagggcttgtatcagtgcatcattatccacaagaaaccaacagggatgatcaggattcatcagatgaattccgagcttagcgtgctg

SEQ ID NO: 1112 - DNA, 1737 bp, synthetic construct
  misc_feature 1..1737: note = sugemalimab antibody heavy chain -CD86 IgV-Q25I/H90I polynucleotide
  source 1..1737: mol_type = other DNA
gaagttcaactgctggaatctggtggtggactggtacaacctggtggaagcctgaggttgagctgtgccgcaagtggattcacatttagttcatacgctatgagctgggtgaggcaggcacctgggaaaggtctggaatgggtgtccgggatttctggctctgggggtttcacctactacgcagactctgtgaagggcagatttaccatctctcgggacaattccaagaatactttgtacctgcaaatgaacagcttgagggccgaagatactgcagtgtactactgtgctaaacccccccggggctacaattacgggccatttgactactggggccagggtaccctggtgactgtatctagcgcctctacgaagggcccttctgtgttccctctggccccttgttcaagatccacaagcgagtcaaccgcagctcttggatgcctggtgaaggactattttccagagcccgtcacagtctcctggaactctggcgcactgacatctggcgtccatacatttccagctgtgctgcagtcctcaggcctgtactccctgtccagcgtggtgaccgtccctagttcctcacttggaacgaagacctatacctgtaacgtagaccataagccttccaacacaaaggtggacaagagggtggagtctaagtatggaccaccatgtcctccttgtccggcacctgagtttctgggtggaccaagtgtctttctgtttccacctaaacccaaggataccctcatgattagtcgaacacctgaagtcacatgtgttgtggtcgacgtgagccaggaggatccagaggtgcagttcaactggtacgtcgacggggtggaggtgcataatgccaaaaccaagccccgggaagaacagttcaacagcacctatagggttgtgtcagttctgacagtgctgcaccaggattggcttaatggtaaagagtataagtgtaaagtcagcaataaaggcctgccttcttctatagagaagacaattagcaaggcaaagggacaaccgcgggaacctcaggtgtacacattgccacccagtcaggaggagatgactaaaaaccaggtaagcctcacctgcctggtaaaaggcttctatccaagcgacattgcagttgaatgggagagtaatggacagccggaaaacaattataagacaacaccccccgtgctcgactctgacgggtcattcttcctctatagccgcttgacggttgataaaagcagatggcaggaaggcaatgtgttcagctgtagtgtcatgcacgaggcccttcacaaccattacacgcaaaagagtctttctttgagtttgggagcaggagggggaggatcaggtggtggtggttcagggggaggcggaagtggaggtggtggttcaggcgcacctttgaagatccaggcgtactttaatgagacagcagatctgccttgccagtttgctaactcccagaacatctctctctccgagctcgtggtgttctggcaagatcaagaaaacctggtgctgaacgaagtgtaccttggcaaagagaaatttgactccgtacatagcaagtacatgggaaggacatcctttgattcagacagttggacactcaggctgcacaacctgcaaattaaagacaaaggcctgtatcagtgcatcatcattcacaagaaaccgactggcatgatcaggatacaccagatgaactcagaactttccgtcctg

SEQ ID NO: 1113 - DNA, 1737 bp, synthetic construct
  misc_feature 1..1737: note = sugemalimab antibody heavy chain -CD86 IgV-Q25V/H90V polynucleotide
  source 1..1737: mol_type = other DNA
gaagtacagctcttggaatcaggcggcggtcttgttcaacctggtggatcactgcgcctgtcttgcgctgcgagcggatttacgttcagttcctacgccatgtcttgggtcagacaggctcctgggaaagggcttgaatgggtttcaggtatctcaggttccgggggatttacatattacgcagattccgtgaaagggagattcactatcagtcgcgacaattctaagaatacgttgtatctccagatgaacagcctccgcgccgaggatacagctgtctactattgtgccaagcctccaagggggtataattatggacccttcgattactgggggcaaggcaccctggtaaccgtgagttctgcaagcaccaaaggtcccagcgttttccctcttgccccctgttccagaagcacatccgaatccactgctgctctgggatgtctggtgaaggactacttcccggagcctgtgaccgtgtcctggaactctggtgccctgacctccggagtgcacacatttccagcagttctgcagagctctggcctctacagtctgtccagcgttgtcacagtcccctcttccagcctcggaactaaaacctacacgtgcaatgtggatcacaaaccaagcaacactaaagtggataagcgggtcgagagcaagtatggtccaccatgtcctccctgccctgctccagaattccttggagggccaagcgtgtttcttttcccccctaagccaaaggacaccctgatgatcagtaggacgccagaagtcacatgcgtggtagtggatgtttcccaagaagatcccgaagtgcaattcaactggtacgtggacggggtcgaggtccataacgcaaagaccaagccgagagaagaacagttcaacagtacttatcgggtggtgtcagtgctgacggtgttgcatcaggactggctgaacggcaaggagtataagtgtaaggtgagcaacaagggtttgccctcatctattgaaaagacgatcagtaaggctaaagggcagcctagagaaccccaggtatacaccctccctccatcccaggaggagatgactaagaaccaggtttcactgacttgcctggtgaagggtttctatccaagcgacatcgccgtggagtgggaaagcaacggccagccagaaaacaactataaaaccacgccgcccgtattggattccgatgggagctttttcttgtatagtcgcctgactgtggataaatctaggtggcaagagggtaatgtgtttagctgcagcgtaatgcatgaggctctgcacaaccattatacacagaaaagcctctcactctcactgggtgctggaggtggtggatccggaggaggtggaagcggaggaggaggtagcggtggaggaggttctggagctcccttgaagattcaggcttactttaacgaaaccgccgatctgccatgccaatttgccaactctcaaaatgtcagtctgtccgaactcgtggtgttttggcaggatcaggaaaacctggtgctgaatgaggtataccttggcaaagagaagtttgacagcgtgcacagcaaatacatgggcaggacctccttcgatagcgactcatggacactcagactgcacaacctgcagatcaaagacaagggcctgtatcagtgcatcatcgtacacaaaaaacccaccggaatgattcggattcaccagatgaattctgagctcagcgtgctc

SEQ ID NO: 1114 - DNA, 1737 bp, synthetic construct
  misc_feature 1..1737: note = sugemalimab antibody heavy chain -CD86 IgV-Q25V/H90I polynucleotide
  source 1..1737: mol_type = other DNA
gaagtacagcttttggagtcaggcggtggtttggtgcaacctggaggtagtctgcggctgtcatgcgctgcaagcgggttcacattttccagctatgccatgagttgggtcagacaggcaccaggaaagggtcttgaatgggtgtcaggcatatctggcagcggagggttcacctactacgcggatagcgtcaaaggcagattcactatatctcgggacaatagcaaaaacactctgtacctgcagatgaactctctgcgcgcagaagacacagcagtgtattattgtgcaaaaccccccaggggatataactacggtcccttcgattactggggacagggaaccctggttaccgtgagcagtgcctcaaccaaaggtccctctgtgttccccctggctccttgttcccggagcacatcagagtctaccgcagcactcgggtgcctggtgaaggactatttccctgaaccagtgacggtgagctggaatagcggggctctgaccagcggggtacacactttcccggccgtgctgcagtctagtggcctgtatagcctcagcagtgtcgtcactgtgccctccagctcacttggaaccaaaacgtatacttgtaatgtcgaccacaagcccagcaacacaaaggtggataagcgggtggaatccaagtatggtccaccatgcccgccttgtccagcaccagaattcttgggcggaccttcagttttcctgttcccacccaagccaaaagacaccttgatgatatcccgaactccagaggttacctgtgtcgttgtggacgtgtcacaggaggacccggaagtccagtttaattggtacgtggatggggtcgaggtacacaatgctaaaacaaagccccgcgaggaacaattcaattctacttacagagtggtctccgtactgacagtgctgcaccaggactggttgaatggaaaggaatacaaatgcaaagtatccaacaagggcctgccctcaagcatcgagaagaccataagtaaggccaaaggtcaaccacgggagccacaggtgtacacactgcctccatctcaggaggagatgaccaagaaccaggtgtccctgacttgtctcgtgaaggggttttacccttctgacatcgcagtggaatgggagagcaacgggcagccggagaacaactacaagactactccgccagtcctcgattctgacgggagcttctttttgtattctcggctgacagtggacaaatctaggtggcaggagggaaatgtattcagctgctcagtcatgcacgaagccctgcacaatcattatacccagaagtccttgtctctttctcttggtgcaggtggtggagggtctggaggtggaggttctggaggtggaggatcagggggaggaggatctggggcacctctgaaaattcaggcctattttaatgaaactgctgatcttccatgccagttcgcaaactcccagaacgtgtcactgagcgagctggtggtgttctggcaggaccaggaaaacctggtgcttaatgaagtgtacctgggcaaagaaaagttcgattccgtccacagcaagtacatgggccgcacttccttcgacagtgactcatggaccctgcggcttcacaaccttcagataaaggacaaagggctctatcagtgtatcatcatccacaagaaaccaaccgggatgatccggatccaccagatgaacagtgaactgtccgttctc

SEQ ID NO: 1115 - DNA, 1737 bp, synthetic construct
  misc_feature 1..1737: note = sugemalimab antibody heavy chain -CD86 IgV-Q25F/H90I polynucleotide
  source 1..1737: mol_type = other DNA
gaagtgcaactgcttgaaagtggaggcggattggttcaacctggcggaagtcttaggcttagttgtgccgcttcaggtttcaccttcagtagctatgccatgtcttgggtgagacaggctccagggaaaggcctggagtgggtgagtggcatctcaggatccggcggatttacttattacgcagatagtgtgaagggcaggttcaccatcagcagagacaactctaagaacaccctttacctgcagatgaattcactgagggcagaggacacagccgtctattactgcgcaaagcctcctcgagggtacaactacgggccctttgactactgggggcaggggacattggtcacagtgtccagcgcaagcaccaagggacctagcgtgttcccccttgctccatgctctaggtccaccagcgagtccacagctgcactcggctgtttggtaaaagactatttccccgagccagtcacagtctcttggaactctggagctttgacctccggcgttcacacttttccagcagtccttcagagttccggtttgtattcattgtcatctgtggttacagtgccctccagcagcctcggtactaagacgtacacctgtaacgtggatcataagcccagcaatacaaaggtggacaaaagggtggaatccaagtacggtcctccatgtcccccttgtcctgcccctgagttcctgggtggtcctagcgtgttcctcttcccacctaagcctaaggataccctcatgatttcaagaactcccgaggtgacgtgcgtagttgtggacgtatcccaggaagatccagaagtgcagttcaactggtacgtggacggcgtcgaagttcacaacgccaagactaagccgcgggaggaacaatttaactccacataccgggtggtgtccgtcttgacagtcctgcaccaagactggttgaacggaaaagaatacaagtgtaaagtgagcaacaagggcttgccttcatctatcgaaaaaacaataagtaaagccaaaggccagccaagggaaccccaagtgtacaccctgcctccatctcaggaggaaatgacaaaaaatcaagtgtccctgacatgtctcgtaaagggattttacccatccgatatcgctgtggaatgggagtcaaatggacaacccgaaaacaactataagaccacccctcctgtccttgactcagatggctcattcttcctttacagcagacttactgtggataagagcaggtggcaagaaggaaatgtcttcagctgtagcgttatgcacgaagccctccataatcactatactcagaagagcctgtccctttcattgggtgcaggtggaggaggaagcggtggaggaggttcaggtggaggaggaagcggagggggaggatctggtgcaccactcaagatccaggcctactttaatgaaaccgctgacctgccatgtcagttcgccaacagccaaaatttcagccttagtgagctggtggttttttggcaggaccaggagaacctcgtcctgaatgaagtgtatcttgggaaggagaagttcgacagcgtgcacagcaagtacatgggccgcacttcctttgactcagactcctggacactgcgccttcataacctgcagatcaaagataagggactgtatcagtgcattattatccataaaaagcccacaggtatgattaggatccaccaaatgaacagcgagctctcagtcctg

SEQ ID NO: 1116 - DNA, 1737 bp, synthetic construct
  misc_feature 1..1737: note = sugemalimab antibody heavy chain -CD86 IgV-Q25F/H90V polynucleotide
  source 1..1737: mol_type = other DNA
gaagtacaactcttggaatccggaggaggtctcgtgcaacctggaggatctctgaggctctcttgcgcggccagtggattcacattctccagctacgctatgtcatgggtcaggcaagcaccaggaaaagggctggaatgggtgagcggaatttctgggtccgggggatttacctattatgctgacagtgtgaaaggaaggttcacaattagccgcgacaactcaaaaaataccctctacttgcagatgaactctctgagagccgaagatacagcagtgtattattgcgccaagccacctcggggctataattatggcccattcgattactggggacaaggtacactggttactgtgagttccgccagcaccaagggcccaagtgtcttccctcttgcaccgtgcagccgctctacaagcgaatcaaccgctgctcttggttgtttggtgaaggactatttccccgaacccgttactgtaagttggaattccggggctctgactagtggcgtacacaccttccctgctgtgcttcagagttctggactctactccttgtcaagcgtggtgacagttccttccagtagcctgggaaccaagacctacacctgtaatgtcgaccacaaaccatcaaacaccaaggtggacaaaagggtggagagtaagtatggtccaccatgtcctccatgcccagcacccgaatttctcggtggacctagcgtgttcctgtttccacccaagcccaaagacaccctgatgatctctaggacccccgaagtgacctgtgtcgtggtcgacgtgtcacaggaggaccccgaggtccagttcaactggtatgtggacggggtcgaagtccataacgccaaaacgaaaccacgcgaggagcagttcaactctacctatagagtagtgtctgtccttaccgtgctgcaccaggattggctgaatggcaaggagtataagtgtaaagtgtccaacaaggggctgcctagcagcatagagaagaccatttccaaagccaaagggcagccgagagagcctcaagtgtacaccctgcccccgtcccaggaagaaatgacaaagaaccaggtttctctgacctgtttggtgaagggcttttatccttccgacattgcggtagagtgggagagcaatgggcagccagagaataattacaagaccacaccaccggttttggactctgatgggagcttctttctctattcacgattgacagtcgacaagagcagatggcaggagggtaacgtcttcagttgctcagtgatgcatgaagctctgcacaaccattacactcagaaatccctgtcacttagtcttggtgctggtggaggaggtagcggtggaggaggatcaggagggggtggatctggtggtggaggctctggtgctccactgaaaatccaagcatactttaatgaaactgcagatctgccatgtcagtttgccaattcacagaatttctcactcagtgagctcgtcgtgttttggcaggaccaagaaaacctggtgctcaatgaagtgtacttgggcaaagaaaaatttgactccgtgcactctaagtatatggggcgcacatcttttgacagcgacagttggacactgcggctgcacaatcttcaaattaaagacaagggcctgtaccagtgtatcatagttcacaaaaagccaactggcatgatcaggatccaccagatgaactcagagctgagtgttctg

SEQ ID NO: 1117 - DNA, 1737 bp, synthetic construct
  misc_feature 1..1737: note = sugemalimab antibody heavy chain -CD86 IgV-A13F/Q25I/F33L/H90I polynucleotide
  source 1..1737: mol_type = other DNA
gaggtacaactgttggaaagtgggggtggtttggttcagccaggagggtctcttagattgagctgtgccgctagtgggtttacattctcatcctacgctatgtcttgggtgcgccaggcacctggcaaaggtctcgagtgggtgtccggcatttccggctctggtggtttcacttattacgctgactctgttaagggaagatttacgatatcaagggataactccaagaatactctgtatttgcagatgaattccttgagggcggaagataccgctgtatactattgtgctaagcccccacgaggttataattatggcccgtttgactattggggtcaaggaactttggtgactgtttcctccgccagcaccaaagggccaagcgtgttccccttggcaccctgtagcagaagtacgtccgaatccacagccgctctgggatgtttggtgaaagattatttccctgagcccgtgacagtgagttggaattcaggcgctctgacatccggcgtacacacgtttcccgccgtcctgcaatcctctggactttacagccttagctccgtcgttacggtacctagtagcagcctgggtaccaaaacttacacctgtaatgtagaccacaaaccctccaacacaaaggtggacaagagagtggagtcaaaatatggtccaccttgtccaccatgtccagcacctgaatttctcggcggaccttctgtgtttctttttcctccaaagcccaaggatactttgatgatcagccggacccctgaggtgacatgcgtagtggtcgatgtttctcaggaagaccctgaggtgcagtttaattggtacgtggatggggttgaggtgcacaacgctaaaactaaacctcgcgaagaacagttcaactccacttacagagtagtctctgtgctgacagtactgcaccaggattggctgaatggaaaggagtacaaatgtaaggtttccaacaagggcttgcccagcagtatcgagaaaactataagcaaagccaaaggccagccaagagagccccaagtctacacactgcctccaagtcaggaggaaatgaccaagaaccaggtgagcttgacctgcttggtgaagggtttttacccctccgatatcgcagtcgaatgggagagtaacggccagcccgagaacaactacaaaacaacaccccccgtcctggattcagacggctccttctttctctacagccgactgacggtagacaagtcccggtggcaggaaggtaatgtgtttagctgctcagtgatgcatgaggccctccataatcattatacacaaaaatcactgtctcttagtttgggagcaggaggaggaggatccggaggtggtggttctgggggaggaggatctggaggaggaggtagtggtgcccctctgaaaatccaggcttattttaacgagacttttgatctgccatgccaattcgctaatagtcagaacatcagcctgagcgagctcgtggtgctgtggcaggaccaggaaaaccttgtgctgaatgaggtgtacctcgggaaggaaaagttcgactccgtgcactcaaagtacatgggcagaacctcatttgatagcgactcatggaccctgcggctgcacaatctccagattaaggataagggcctgtatcagtgcattataattcacaaaaaacctaccggcatgataaggatccaccagatgaattcagagctgtctgtgctc

SEQ ID NO: 1118 - DNA, 1737 bp, synthetic construct
  misc_feature 1..1737: note = sugemalimab antibody heavy chain -CD86 IgV-A13M/Q25I/F33L/H90I polynucleotide
  source 1..1737: mol_type = other DNA
gaagtgcaacttttggaatctggtgggggtctggtgcaacctggaggatcactgaggcttagctgcgccgcatctggttttacgttttctagctatgctatgtcatgggtgagacaagcccccggcaagggccttgaatgggtgtctgggatttcaggctcagggggattcacgtattacgcagacagcgtgaaggggagatttacaatctctcgcgacaacagcaaaaatacgttgtacctccagatgaacagtctgagggcagaggacactgccgtgtactattgtgccaagccaccccggggatacaattatggtccgtttgactattggggccaaggtacattggttaccgtgagttctgcatcaactaaggggccaagcgtgttccctcttgcaccttgcagccgcagcacctcagagagtacagcggccctggggtgtcttgtcaaggattacttccctgagccagtgacagtttcctggaacagcggagccctgacaagcggcgtgcatacattccctgcagtgttgcagtctagcggcctgtactccttgtcctccgtggtgaccgtgcctagtagctccctggggacaaaaacatacacatgcaatgtggatcataagccctctaacacgaaggtggacaagagggtcgaatctaaatatggaccgccttgtcccccttgtcctgcacctgaatttttgggagggccctcagtgttcttgttccctccaaaacccaaggatacactgatgatctcaaggacgcctgaggtaacatgcgtggtggtcgacgtctcccaggaggacccagaggttcagttcaattggtacgtggatggcgtggaggtccataatgcaaagacgaaacctcgggaggagcagttcaactccacttatagagtggtgagtgtgctcaccgtccttcaccaggactggctgaacgggaaggagtacaagtgtaaggtgagcaataaaggactgccgtccagcattgagaagactatctccaaagccaaagggcagcctcgggaacctcaggtgtacacccttccaccctcacaagaagagatgacaaaaaatcaggtgagcttgacttgcctggtgaagggtttttacccaagcgacatagccgtagagtgggagtcaaacggccagcccgaaaataactacaagaccacacctccagtgctcgatagtgatggcagtttctttctgtattctcggctgactgtggataagtctcgctggcaggaaggcaacgtgttttcctgcagcgtgatgcacgaggcgctgcataaccattacactcaaaagagcctttctttgtcccttggagctggaggaggcggtagtggtggtggtggttcaggaggaggagggtcaggaggtggtggaagcggtgcacctctcaagattcaggcctactttaacgaaactatggacctgccttgccagttcgccaattcccaaaacattagcctttccgagttggttgttctctggcaagatcaagagaacctcgttctgaacgaggtgtatttggggaaggaaaagttcgattccgtccactctaaatatatgggcaggacgtcctttgactcagatagctggacattgcggttgcacaatctccagatcaaggataaaggcctgtatcagtgtatcatcatacataagaagcctactggaatgatcaggattcatcagatgaactcagagctgtcagtgctg

SEQ ID NO: 1119 - DNA, 1737 bp, synthetic construct
  misc_feature 1..1737: note = sugemalimab antibody heavy chain -CD86 IgV-Q25A/F33L/H90I polynucleotide
  source 1..1737: mol_type = other DNA
gaggttcaattgctggaaagtggagggggcttggtacaacctggaggatccctgaggctcagttgcgccgcttctgggttcaccttctcatcatatgccatgtcatgggttagacaagcaccaggcaaaggccttgagtgggtctccggaattagcggctccggaggtttcacatactatgcagattcagtcaagggacgcttcactataagcagagacaatagtaaaaacaccctttatctgcagatgaattccctgagagctgaggacacggctgtgtactattgtgccaaacctccaagggggtacaattacggaccatttgactactggggacaggggactctcgtcactgtctccagcgcttctactaagggaccctctgtctttccactggctccctgtagcaggagcacttctgagagcactgcagctttgggatgtctggtcaaggactattttcccgaacctgtgaccgtgagctggaatagcggggctctcaccagcggagtgcatacctttccagccgtcctgcagtcatcaggcctgtatagcctgtcctctgttgtgaccgtccctagttcaagcctgggaactaagacctatacatgcaacgtggaccacaagccatccaacaccaaagtagacaaacgcgtggaatccaaatatggacccccttgtccaccttgccctgctccagaatttctcgggggcccgtctgtctttttgttcccccccaagcccaaagatactctgatgatatccaggactcccgaagtgacctgtgtagtggttgacgtttctcaagaggacccggaggtgcagttcaattggtacgtggacggcgtcgaggtgcataatgccaagaccaagccccgcgaggagcagttcaatagtacctaccgggtggtcagcgtgctcacagtcttgcaccaagattggctgaacgggaaggaatacaaatgtaaggtgtctaataagggattgccgtcaagcattgagaagaccatcagtaaggccaaagggcagccacgcgagccacaagtgtacacccttcccccctctcaagaggagatgacaaaaaaccaagtgtctctgacatgcctggtaaagggcttctacccctccgacattgcagtggagtgggagtccaatggccagcccgagaacaattataaaacgacacctccagtgctggattctgacggcagttttttcctgtattcacggcttaccgtggacaagagcagatggcaggaaggcaatgtgttttcttgtagtgtcatgcacgaagccctgcataatcactacacacaaaagagcctgtcattgagtcttggagctggtggtggagggagtggagggggaggtagtggtggaggaggtagtggaggaggcggctctggtgctcctctgaagatccaagcctactttaatgagaccgcagatttgccatgtcagttcgccaacagccaaaatgcatccttgagcgagctcgtggtgttgtggcaagaccaggaaaatttggtgctgaatgaggtgtatttggggaaagaaaaattcgacagtgtccattccaagtacatgggccggacttcctttgatagcgactcatggactctcaggttgcataacctgcagatcaaggacaagggcctctaccagtgcatcatcatacacaagaagccgacaggaatgatcaggatccaccagatgaattccgagcttagcgtgctg

SEQ ID NO: 1120 - DNA, 1737 bp, synthetic construct
  misc_feature 1..1737: note = sugemalimab antibody heavy chain -CD86 IgV-Q25M/F33L/H90I polynucleotide
  source 1..1737: mol_type = other DNA
gaagtgcagttgcttgaatcaggcggaggattggttcaacctgggggatcattgagactctcttgcgcagccagtgggtttaccttcagcagctatgccatgtcttgggtcaggcaggcaccaggaaagggattggagtgggtttctgggatatccggatccgggggctttacttattacgccgactccgtcaaaggcaggttcacaatttcacgggataactctaagaatacactctacctgcagatgaactcactgagagctgaggacactgcagtctactactgcgccaaaccccctcggggctacaattacggcccttttgactactggggccagggtacccttgtcacagtatccagcgctagtaccaaggggccctccgtatttcccctggccccttgttctaggagcacaagcgagtccactgccgctctgggctgccttgtcaaggattacttccccgaacctgtaacggtctcttggaattccggcgccttgacttcaggcgtgcataccttccctgctgtgttgcagtccagtggactctactccctctcatctgtggtgacagtgccttcttcctctttgggtacaaagacatacacctgtaacgttgatcacaagccgtcaaatacaaaggtggacaaacgggttgaatcaaagtatggcccaccttgtccaccatgtcctgcgccagagtttctgggcggaccctcagtcttcttgttcccccccaagcctaaggataccctgatgattagcaggacacccgaagtcacgtgcgttgtcgtggatgtaagccaggaagacccagaggtgcagttcaattggtacgtggacggagtagaagtgcataacgccaagacaaaaccacgggaggagcagttcaattctacgtatagggttgtgtcagtactgactgtcttgcaccaagactggctgaacggcaaggagtacaagtgtaaggtgtccaataaaggattgccctcctctatcgagaagacgatcagcaaggctaaggggcaaccacgggaaccgcaagtctatacactgccacctagtcaggaggagatgacaaaaaatcaggtatcactgacttgtttggtcaagggcttctaccccagtgatatcgccgttgaatgggaatccaatggacagcccgaaaacaactacaagaccactccccccgtgctggattccgatggatctttcttcctgtactctcggctcacagtagacaaaagccggtggcaagagggaaatgtattcagttgttctgtcatgcacgaggccttgcataatcactacactcaaaagtctctgtcattgagtctgggggctggaggaggaggtagtggaggaggaggatctggaggcgggggatcaggaggaggaggttctggagccccattgaagatacaggcctacttcaatgagacggccgacctgccttgtcagtttgctaactcccagaatatgtcactgagtgaattggtagtgctctggcaggaccaggagaaccttgtcctgaacgaggtctacttgggaaaagaaaaatttgacagtgtgcactcaaaatatatgggaagaacatcatttgatagtgatagttggaccctgagactccataacctgcaaattaaggataaaggcctgtaccaatgcataataatccacaagaagcctacaggcatgatcagaatacaccagatgaactcagaactgtccgttctc

SEQ ID NO: 1121 - DNA, 1737 bp, synthetic construct
  misc_feature 1..1737: note = sugemalimab antibody heavy chain -CD86 IgV-Q25I/F33M/H90I polynucleotide
  source 1..1737: mol_type = other DNA
gaagtgcaactgttggaaagtggcggagggttggtacaaccaggagggtctctgcgccttagctgtgctgctagtgggtttactttttcctcttatgccatgtcctgggtcaggcaagctccaggtaaaggtctggaatgggtgagtggaatctccggtagcggagggtttacttattatgctgactccgttaagggccggtttaccatcagtagggataactccaagaacacgctgtatctccagatgaacagcttgagagctgaggatacagccgtttattattgcgcaaagccgccgaggggctacaattacgggccctttgattactggggacaaggcactctcgttactgtttcctcagctagcaccaaaggacctagcgtttttcctctcgcaccatgctccagaagcacaagtgagtctactgccgctttgggatgtctggtcaaagactactttccagaacccgtgactgtcagctggaattccggggcactcaccagcggtgtgcatacctttcctgccgttctgcagagctcaggattgtactcactgagcagcgtggttacagtaccctctagtagcctgggaaccaagacttacacatgcaacgtcgaccacaaaccatccaataccaaggtcgacaagagggtggaatctaagtatggtccaccttgccctccttgtccagctccagagtttctggggggcccatccgtgttcctctttccccctaaaccaaaggatacactgatgatcagccggacccctgaagtgacctgcgtggtcgttgatgtttctcaggaggatcccgaggtgcaattcaactggtatgtggatggggtggaggttcacaacgctaagaccaagccacgcgaggaacagttcaatagtacgtatcgcgtggtgtccgtgttgactgttctgcaccaggactggctcaacggcaaggaatacaaatgtaaagtgtccaataaagggctccctagctcaattgaaaagactatcagcaaggctaaaggccaaccaagagaaccacaagtgtataccctgccacccagccaagaggagatgaccaagaaccaggtgtccctgacttgcttggtaaagggcttttaccctagtgatatagcagttgaatgggagagcaacggccagccagaaaacaactacaaaaccactcccccggtacttgatagcgacggctcctttttcctgtactccagactcacagtggataagtcaagatggcaggagggaaatgtgttttcctgtagtgtcatgcacgaggctctgcacaaccactatacacagaagagtctgtcattgtccctgggagctggaggtggaggctctggtggaggtggatccggaggaggtggaagtggaggtggtggcagtggagctcctctgaaaatccaggcctactttaacgagaccgcagatctcccctgccagttcgctaacagtcagaacataagcctttccgagttggtggtgatgtggcaagaccaggagaatctcgtactgaacgaggtgtatctggggaaagaaaagtttgacagcgtgcacagcaaatacatgggccgaacctcctttgatagtgattcttggacgctgcggctgcataacttgcagattaaagacaaaggcctgtaccagtgtatcattatccacaagaaacccactggcatgatccggattcaccagatgaacagcgaactcagtgtcctg

SEQ ID NO: 1122 - DNA, 1737 bp, synthetic construct
  misc_feature 1..1737: note = sugemalimab antibody heavy chain -CD86 IgV-Q25I/F33L/I89V/H90I polynucleotide
  source 1..1737: mol_type = other DNA
gaagtgcaacttttggagagtggaggtggattggttcagccagggggaagtctgcggctttcctgcgcagcatctggattcacattttctagttatgccatgtcttgggtcagacaagctccaggaaaaggcctggagtgggtttcaggaatcagtggtagcggcggttttacttactatgctgattccgtgaaggggcggtttaccatttctcgcgacaattctaagaatactctctacctccagatgaactctctgagagcagaagataccgcagtgtactactgcgccaagcctccacggggatataattacggaccctttgactattgggggcagggcaccctggtcactgtgtctagtgcaagtaccaaaggcccaagcgtctttcctctggcaccgtgttctcggtccacttccgagagtacagccgcactgggctgtttggtcaaggactactttcctgagccagtgacggtgtcctggaatagcggggcattgacgtcaggggttcacacttttcccgccgttctgcagagcagcggactgtactcactgtccagtgtggttactgtgccgagcagcagcttgggtactaaaacctacacatgcaacgtggatcataagccgagcaacaccaaggtagataaacgagttgaatccaagtacggacctccatgtccaccttgtccagcacccgaattcctgggcggaccttctgtgttcttgttcccacccaagcccaaagataccctgatgatatctcgaactcccgaagtcacttgcgtcgtggttgatgtgtctcaggaagatcccgaagtgcagttcaattggtatgtggacggcgtggaagtgcacaacgcaaagactaagcctcgggaggagcaatttaattccacgtatagggtggtgtctgtcctgaccgtattgcatcaggattggctgaatggaaaagaatacaaatgtaaggttagcaacaagggcttgccaagctctattgaaaagaccatcagcaaagctaaaggccagccaagggaaccacaggtctatacactgcccccgagccaggaggaaatgacgaagaatcaggtatcccttacctgcttggtcaaaggcttctatccatctgacatagccgtagagtgggagagtaacggccagccggaaaataattataagaccacaccccctgttctcgacagcgatggttccttcttcctgtattctcggttgactgtggacaagtcacgctggcaagaggggaatgtgttttcatgcagcgtgatgcacgaagctttgcacaatcattacacgcagaagagtctgagcctgagcttgggagctggaggaggcggttctggaggaggaggttctggaggaggaggaagtggaggaggaggctcaggcgcacctcttaagatccaggcctattttaatgagaccgccgacttgccctgtcagttcgcaaatagccagaacatttcacttagtgagctggttgtgctctggcaggaccaagagaacctggtgttgaacgaggtgtatctggggaaagaaaagttcgacagtgtccacagcaagtacatggggcgcacctctttcgattcagacagttggaccttgcgcctgcataatctccagatcaaagataaaggactgtaccagtgcatcgtgatccacaagaagcctaccggcatgatacggattcaccagatgaattcagagctcagcgtgctt

SEQ ID NO: 1123 - DNA, 1737 bp, synthetic construct
  misc_feature 1..1737: note = sugemalimab antibody heavy chain -CD86 IgV-Q25I/F33L/I89F/H90I polynucleotide
  source 1..1737: mol_type = other DNA
gaagttcaattgcttgagagtggcggaggactcgttcagcctggtggttcactccgcttgagctgtgccgctagcggatttacattttcttcctacgcaatgagctgggttcgccaagcaccagggaaagggctcgagtgggtgtctggtataagcggatccggcggtttcacttactatgccgacagcgtgaagggcaggtttaccataagccgcgacaatagcaagaataccttgtacctccaaatgaatagcttgagggctgaggacactgccgtgtattactgcgccaaaccaccgcgagggtacaattatggaccctttgattactgggggcagggcacactcgtcacagtatccagcgcctctacgaaagggcctagcgtgtttccgctggccccatgtagtaggtctacatccgaatctactgcagcccttggatgccttgtgaaagactatttccctgaacccgtgacggtgtcttggaattccggagcactcacgtcaggcgtgcacactttccctgctgtgttgcagagcagtggcttgtattctctgtctagcgtagtgaccgtaccttcctccagtctgggtaccaagacttatacgtgcaatgtggatcacaaacccagtaatactaaggtcgacaagcgagttgaaagtaagtacggacctccatgtccaccatgccccgcacctgagtttttggggggaccctcagtgttcttgttcccacccaaacccaaggacacactgatgatttccagaacacctgaggttacgtgcgtggtcgtggatgtgtcccaggaggaccctgaagtccagtttaattggtacgtcgacggtgtcgaggtgcacaacgccaagacaaaaccgcgcgaggaacagttcaacagtacttatcgggtcgtgtccgtgctgaccgtactccatcaagactggctgaatgggaaagaatacaagtgtaaagtgtccaataagggcctgccttcatctatcgagaagaccatttctaaggcaaagggccagcctagggagccccaagtttatacattgcccccaagtcaggaagaaatgacaaagaatcaggtgtctctgacctgcctcgttaaaggattttatcccagcgacatcgcggtggaatgggagagcaatggccagcccgaaaataattataagacaacaccgcctgtgttggattcagatggatcattcttcctctacagtcgcctgaccgtggataaaagcaggtggcaggaggggaatgtgttctcatgttcagttatgcacgaggctctccataatcactatactcaaaagtctctgtctctgtcattgggagctggaggaggaggttcaggtggaggtggttcaggtggcggtggatctggaggtggaggaagtggagcaccgctgaagatccaggcctactttaacgagactgccgatctgccttgccagtttgccaatagccaaaacatttctctttctgagctggttgtgctctggcaggatcaagagaatctggtgctgaacgaggtctatctgggtaaggagaagttcgattctgtgcattccaagtacatgggcaggacctcttttgatagcgactcctggacccttcggcttcataatcttcagatcaaagataagggactgtaccaatgtatcttcatccacaagaagcccaccggcatgattcgcatccatcagatgaatagtgagctgtccgtcctt

SEQ ID NO: 1124 - DNA, 1737 bp, synthetic construct
  misc_feature 1..1737: note = sugemalimab antibody heavy chain -CD86 IgV-Q25I/F33L/I89M/H90I polynucleotide
  source 1..1737: mol_type = other DNA
gaagtccagttgttggagtctggtggtggacttgttcagcctggaggttcactgcggctctcctgtgctgcttccggtttcaccttctcttcctacgccatgtcatgggtccgacaggctcctggaaagggcctggaatgggtgtccggcattagtgggagtgggggattcacttactacgcagactctgtgaaagggcgatttacaatctccagagacaactccaaaaatacactgtacctgcagatgaactctctcagggccgaagacactgccgtctactattgcgccaaaccaccaagaggatacaattatggcccatttgactactggggccagggaacattggtgacagtgagctctgccagcacgaagggaccttcagtcttccctctggcaccttgctccagatccacctccgaaagtaccgctgccctggggtgcctggtgaaagactatttccctgagcctgtcaccgtctcctggaactctggagccctgactagcggcgtgcacacctttccagccgtcctgcagtcaagtgggctgtatagcctttcctctgtggtcaccgtgccttcttcctcactcggaacgaagacatacacctgtaacgtagatcataaaccatccaatacaaaggttgacaagcgagttgaaagtaaatatgggccaccatgtccaccatgtccagcacctgaatttctgggaggcccttcagtgtttctgttccctcccaaaccaaaagatactcttatgatctcacgcactcctgaagtgacctgtgtcgttgttgatgtgagccaggaagatccagaggtgcagtttaactggtacgtggatggcgttgaagttcacaacgcgaagactaagccccgcgaggagcaatttaacagtacgtacagagtggtgagtgtcttgactgtcctgcaccaggattggctcaacgggaaagagtacaagtgtaaggtttctaacaaagggctgccgagttcaatcgagaagaccatatccaaggcaaaaggccagccaagggaaccccaggtgtatactcttccaccttctcaggaggagatgaccaaaaaccaggtcagtttgacttgtctggttaaagggttctacccctcagacatcgccgttgagtgggaaagtaatggccaacccgagaacaactataagacaacccctcctgtcctcgacagcgacggtagtttctttctgtacagcagactgaccgtggataaaagtagatggcaggagggtaacgtttttagttgttccgttatgcacgaggcacttcataaccactatacgcaaaaatccctgtccttgtctcttggtgctggaggcggaggaagtggaggtggtggatcaggaggtggtgggagtggaggaggaggtagtggtgccccactgaagattcaggcctatttcaacgagaccgccgatttgccatgccagttcgcaaacagtcaaaacataagcctgtccgagctggtggttctttggcaggatcaggagaatctggtgttgaacgaagtgtacctcggcaaggaaaaattcgactccgtgcactccaagtacatggggcgcacctcattcgacagtgattcttggactctcaggctgcacaacctccagatcaaagataagggactgtaccaatgtatcatgattcataaaaaacctactggcatgatccgcatccaccagatgaattccgagctgtccgtcctg

SEQ ID NO: 1125 - DNA, 1737 bp, synthetic construct
  misc_feature 1..1737: note = sugemalimab antibody heavy chain -CD86 IgV-Q25I/F33L/H90M polynucleotide
  source 1..1737: mol_type = other DNA
gaagtgcaattgctggaatctggcggtggactggttcaaccaggaggatctctgcggctctcatgcgctgcgtccggattcaccttcagctcttacgctatgagctgggtaagacaggcaccaggaaaagggcttgagtgggtctctggcatcagcgggagtggaggattcacatactacgccgacagcgtgaaggggcgctttactattagccgggacaactctaaaaacactctttacctgcaaatgaatagcctgagggccgaagacaccgctgtgtactactgcgcgaaacccccccggggatacaattatggtccgttcgattactggggccaggggaccttggtgactgttagtagcgcctccaccaaaggtccttccgtgttcccattggccccctgtagccggtccaccagtgagtctaccgcagctctcggttgtctggtgaaggattattttcccgagcctgtgaccgtgtcctggaacagtggggctctgacctctggggttcacactttcccagcagtgctgcagagtagtggcttgtattcactcagctccgttgtgactgttcctagtagctcactgggcaccaagacctacacgtgtaacgtggatcataagcccagcaacactaaggtggacaaacgggtggagtccaagtatggccctccttgtccaccttgtcctgccccagagtttttgggggggccttccgtgttcctcttcccaccaaagccaaaagacacactgatgatctcacgaacccccgaggtcacttgcgtggtggtggacgtttcccaggaagatcccgaggtgcagttcaattggtacgtggacggtgtggaggttcataatgccaagactaaacctcgcgaagagcagttcaattcaacttaccgcgttgtgtctgtcctcacggtgctccaccaggactggcttaacggcaaagagtataaatgcaaggttagcaacaaaggcctgccctccagcatcgagaaaacaatcagcaaagctaaaggtcagccccgagagccacaagtgtacacacttcctccaagccaagaggaaatgaccaagaaccaagtttctctgacttgtctggtaaaggggttctacccctctgacattgccgtagagtgggagtccaatggacagccagaaaataactataaaacaaccccaccagtcctggacagtgacgggtctttttttttgtatagtaggttgacagttgacaagtcaaggtggcaggaaggtaacgtcttttcatgctctgttatgcatgaggctcttcacaatcattatacacagaagagcctgagtctctctttgggtgctggaggaggtgggtcaggaggtggaggtagtggtggaggaggcagtggaggcggaggtagtggagctcctctgaagatacaggcatactttaacgagaccgccgatttgccttgtcagttcgcaaactcccagaacatttctctttctgagctggttgtgctgtggcaagatcaggagaatcttgttttgaacgaggtctacctgggtaaggaaaagttcgactccgtacactccaagtacatgggcaggaccagttttgacagcgactcttggacactgaggctgcacaacctgcagataaaagacaagggactttatcagtgtattattatgcataagaagcccaccgggatgataagaatacatcagatgaacagcgaactgagcgtcctc

SEQ ID NO: 1126 - DNA, 1737 bp, synthetic construct
  misc_feature 1..1737: note = sugemalimab antibody heavy chain -CD86 IgV polynucleotide
  source 1..1737: mol_type = other DNA
gaggtgcaacttttggagtctggaggagggttggtacaaccaggagggtcactgagactgtcatgcgccgcgagcggctttaccttcagctcatacgctatgtcttgggtcaggcaagctccaggcaaaggattggaatgggtgtctggcattagcggaagcggagggttcacttactacgccgacagcgtaaagggcaggtttacaatctcacgggacaattcaaagaataccctgtacctgcagatgaattctctgcgggccgaggataccgctgtttactactgtgccaaacccccccgaggctataattacgggccatttgactattgggggcagggaaccctcgtgacagtctcatctgcttccactaagggcccctctgtctttcctctggccccctgttccaggagcacatcagagtctacagcggccttggggtgtcttgttaaagactatttccccgaaccagtgaccgtctcatggaattctggcgcacttacctcaggggtccacacattcccggctgtgctccaaagctctggcctctactctctctcctcagtggtcacagtgcccagttccagcctggggactaagacctacacctgtaacgtagatcataaaccttcaaacaccaaagtggacaagcgggtggagtctaagtacggtccaccttgtcccccttgtccggctcctgaattcctcggtggaccaagtgtcttcttgttcccccccaaacctaaagatacactcatgatcagccgcactcccgaagtgacttgcgttgtagtcgatgtcagccaggaagaccccgaggtacaatttaactggtacgtggacggggtggaggttcataatgcaaaaacgaaacccagggaagagcagttcaactcaacatatagggtagtgagcgtgctcaccgttttgcatcaggactggctgaatggtaaggagtacaaatgcaaagtatccaataaaggcttgccatccagcattgagaagactattagtaaggcaaagggacaaccccgagaacctcaggtgtacactctgcctccttcccaggaagagatgacaaagaaccaggtatcactgacatgcctcgtgaaaggattttacccctccgacattgctgtggaatgggaatcaaacgggcaaccagaaaataactacaagaccactcctccagtacttgacagtgatggatcatttttcctgtactcccgacttacagtggataaatcccggtggcaggagggcaacgtcttcagctgcagcgtgatgcacgaagccctccataaccattacactcagaagtcactgagtttgagcctgggagcaggaggaggaggtagtggcggtggtggaagtggtggcggtggaagtggaggtggtggttctggggctcccctgaaaattcaggcttatttcaacgagaccgctgaccttccgtgtcagttcgctaatagtcagaatcagagcctgtccgaactcgtggtgttctggcaggaccaggaaaacctggtgctcaatgaggtgtatctggggaaagaaaagtttgatagtgtgcattctaagtatatgggcagaacttcatttgattcagactcatggactctgagattgcacaacttgcagattaaggacaaaggcctctatcaatgtattatacatcataaaaaacccacaggaatgatcagaattcaccagatgaatagcgagctgtcagtgctg

SEQ ID NO: 1127 - DNA, 1740 bp, synthetic construct
  misc_feature 1..1740: note = CD86 IgV-Q25I/F33L/H90I-sugemalimab antibody heavy chain polynucleotide
  source 1..1740: mol_type = other DNA
gcaccactgaaaatccaggcttactttaacgagaccgccgatcttccgtgtcagttcgccaacagccagaacatcagtctgagtgagctcgtggtgctctggcaggaccaggagaatcttgtgctgaatgaggtctatctcggcaaggaaaagtttgactccgtccactccaaatatatgggacggacaagtttcgatagcgactcttggacattgcggctgcacaacttgcaaattaaggataaggggctgtaccagtgcattattatccataagaagcccaccgggatgatcagaattcatcaaatgaattctgagctttccgtgctggctggaggtggcgggagcggcggaggcggctcagggggcggaggtagcggcggtggtggtagtggagaggtgcagctcctggagagcggcgggggccttgtacagccaggagggtcactgcgcctgagttgtgctgcatctggatttactttcagcagttatgctatgtcctgggttcgacaggccccaggcaaaggcctcgaatgggtctccggaatttctggtagcggtggattcacctattatgccgactccgtgaagggacggtttaccatttctcgagataacagcaaaaatacactgtacctccagatgaattctcttagagctgaggacaccgccgtgtactattgtgccaagcctcctcggggatataactacgggcccttcgactattgggggcaggggacactggtgaccgtcagctcagcatctacaaaaggtccctccgtctttcccctggcaccatgctccaggtccacaagcgagtccactgccgcccttggctgcctggtgaaagattattttccagaacccgtcacagtgtcatggaactcaggggccctgaccagtggtgttcatacctttccagccgtgctgcagagcagcgggctctattctctcagcagtgtcgtgacagtaccatcttcctccctgggaaccaaaacctacacatgcaacgtcgatcacaagccatccaataccaaagtggataagcgggtggagtccaagtacggacctccgtgtccaccatgcccagctcctgagtttcttggggggccttccgtttttctctttccccccaagccgaaggatactttgatgatatcccggacccctgaggtcacttgtgtggtagtcgacgtgagccaggaagaccccgaagtccagttcaactggtacgtggacggcgtcgaagtacacaatgcaaaaaccaaaccacgggaggagcagttcaacagcacctacagggttgtgagcgtgctgacagttctccaccaagactggctcaacggtaaggagtacaaatgcaaggtgtcaaataaaggtttgcccagctctatcgagaagaccatcagtaaggccaaggggcagcctcgggagccccaagtgtataccctgcctccttctcaggaggaaatgactaagaatcaggtctccttgacctgcctcgtgaaagggttttatccatcagatattgctgtcgaatgggaatccaatggccaaccggagaataactataagactactccgccagttttggacagcgacggatcttttttcctctacagccggctgaccgtcgacaaatctcggtggcaggaggggaacgtctttagctgctctgtaatgcacgaagcactgcacaaccactatactcagaaaagcctgagcctgtctttggggaag

SEQ ID NO: 1128 - DNA, 1740 bp, synthetic construct
  misc_feature 1..1740: note = CD86 IgV-Q25V/F33L/H90I-sugemalimab antibody heavy chain polynucleotide
  source 1..1740: mol_type = other DNA
gctccactcaaaatacaggcctatttcaacgaaaccgccgatttgccctgccagttcgcgaatagccagaacgtctcattgagcgagctggtggtgctttggcaggatcaggagaatctcgttctgaacgaggtttatctcggcaaagagaaatttgacagtgtgcatagcaaatacatgggtcggacctcttttgacagcgattcctggacccttcgactccacaacttgcagataaaagataaggggctctatcagtgcattatcatccacaaaaaacccacagggatgattcgcatccatcagatgaatagtgagctgagcgttttggccggcggtggaggtagcgggggaggtggcagtggcggcgggggatccggcggaggcgggagtggcgaagtgcagttgctggaatccggcggcggcctggtccagccaggaggaagccttcgcttgagctgcgccgcctcaggctttacattcagctcatacgccatgtcctgggtgagacaagccccaggaaagggccttgagtgggtctcaggaatatcaggtagcggaggctttacatactacgctgatagtgtaaagggcaggttcacaatctctcgggataactcaaaaaacaccctctacctgcagatgaattccctcagagctgaggacactgcagtttattattgtgccaagccccccagaggttacaactatggtccattcgactactggggtcagggcacgctggtcaccgtcagctctgctagcacaaaggggccaagcgtctttcccctggccccttgcagcagaagcactagcgagtccacagccgctcttggctgcctggtaaaagactattttcctgagcccgtgacagtgagctggaatagcggcgcactgacatctggagtgcacaccttccccgcagtgctgcaatcttctggcctgtattccttgtctagcgttgtaaccgttccctcttcttccttggggacaaaaacttacacatgtaacgtagatcacaagcctagcaatacaaaggtagacaagagggttgaatccaagtacggcccgccttgcccaccctgccccgcccctgagtttctcggtggcccatccgtgtttttgtttcctccaaaacctaaagacacactgatgatcagcagaactccagaggttacttgcgtcgtcgttgacgtgagccaggaggatcccgaggtgcagttcaactggtacgtcgatggggtggaggtgcacaatgcaaaaactaagcctagagaagagcaattcaacagcacatatcgggtggtttcagtgttgaccgtgctgcaccaggattggctcaacgggaaggagtacaagtgtaaggtgtctaataagggcctcccaagttcaatcgaaaaaaccataagcaaggctaagggccaacctcgggagccccaggtgtacacacttccaccttctcaagaagaaatgaccaaaaaccaagtaagcctgacatgtctggtgaagggcttctacccctccgatatcgctgtcgagtgggagagcaacgggcagccagaaaacaattacaaaactacccccccagttctggactctgatgggagcttttttctttattcccgcttgactgtggacaagtcccggtggcaagagggaaacgtgttcagctgcagtgtgatgcacgaggctctgcacaatcactatactcaaaagagcttgagtctctctctggggaaa

SEQ ID NO: 1129 - DNA, 1740 bp, synthetic construct
  misc_feature 1..1740: note = CD86 IgV-Q25I/F33V/H90I-sugemalimab antibody heavy chain polynucleotide
  source 1..1740: mol_type = other DNA
gcccctctgaagattcaggcttacttcaatgaaaccgcggatctgccttgccagtttgcaaactcccagaacatatccctgtccgaactggtcgtcgtgtggcaggatcaggaaaatcttgtcctgaatgaggtatatctgggtaaagaaaaatttgacagtgtgcattcaaagtacatgggcagaaccagttttgatagtgactcatggaccctgaggcttcacaacctgcagattaaagataaaggcctgtaccagtgcatcatcattcacaaaaaaccgaccggcatgataaggatccaccagatgaactctgaacttagtgtgctggccggaggaggaggttcaggtggaggcggatcaggaggaggaggatctggtggcggaggatccggagaagtacaactgctggaaagtggaggaggattggtgcagccaggcggttctctgaggctctcatgtgcggcctccggcttcaccttttcatcttatgctatgtcttgggtgaggcaggctcccgggaaaggacttgaatgggtgagcggcatttctggttccggcggattcacctactacgccgactctgttaaaggaaggttcacaatctctcgagacaactcaaaaaacaccctttacctgcagatgaattccctcagagcagaggacacagcggtgtattactgtgccaagcccccacggggttataactacggccccttcgactactggggtcagggtactctggtgacagtctcctcagcctccacaaaaggcccatccgtgtttccactggccccctgttcccgctctacctctgagtccacagccgcactggggtgtctcgtgaaggattacttcccggaacccgtaacagtgtcatggaattccggcgccctcacctcaggagtccatacattcccagctgtgctccagtcatcaggtctgtacagcctgagctcagtagtcacggtgcccagctcctcacttgggacaaaaacatatacctgcaatgtggaccacaagccgagtaatacaaaagtggacaagagagttgagagcaagtacggtccgccatgtcctccatgtcctgcacccgaatttctcggaggcccatctgtctttctgtttcccccaaagcccaaggataccctgatgatcagtcgcactcccgaggtgacctgtgtggtggtggatgttagccaggaagatcccgaggttcagttcaattggtatgtcgacggggttgaggtgcacaacgctaagacaaaaccccgggaggaacagttcaatagcacataccgggtagtgagcgtgctgactgtattgcatcaggattggctgaacggaaaggaatacaagtgtaaggtgagcaacaaaggcctgcctagtagcatcgaaaagaccatcagcaaggccaagggccaacctagagagccccaggtgtacactcttcccccctctcaggaggagatgaccaagaatcaggtgtcacttacctgcttggtcaaagggttttatccatcagatatcgctgtggaatgggagagtaacggccagccggaaaacaattacaaaactaccccacccgtgctggattcagacggcagcttcttcctgtattcccgattgaccgttgacaagtcccgctggcaggagggaaatgtgtttagctgcagcgtaatgcacgaagcactgcataatcattacacacaaaagagcttgagtctgagcctgggaaag

SEQ ID NO: 1130 - DNA, 1740 bp, synthetic construct
  misc_feature 1..1740: note = CD86 IgV-Q25V/F33V/H90I-sugemalimab antibody heavy chain polynucleotide
  source 1..1740: mol_type = other DNA
gctccacttaaaattcaggcctactttaacgagacagctgatttgccatgtcagttcgccaattcccagaatgtcagcctgagtgagctggtcgtcgtctggcaggaccaggagaacctggtgttgaacgaagtgtacttgggcaaggaaaagtttgactccgtccactctaaatatatggggagaaccagcttcgatagcgactcatggaccctgaggctccacaatctgcagatcaaagacaaggggctctaccagtgcattattattcacaaaaagccaaccggcatgattcgaatccatcagatgaattcagaactgtccgttctggctggaggaggagggagcggcggagggggctctggagggggaggaagtggtggcggtggctcaggcgaggtgcagctgctcgagtcaggaggcgggctggtccagccaggaggcagcctgcgactctcctgtgcagcttcaggctttaccttttcttcttatgctatgtcatgggtcagacaggcacccggcaaaggtcttgaatgggtctccggcatcagcgggagcggtggttttacatattacgctgacagtgtcaagggcagattcacaatcagtcgagacaattcaaagaatactctgtatttgcaaatgaatagtcttcgcgctgaagataccgctgtgtactactgtgccaagcctccacggggctataactatgggccattcgattattggggtcaggggacactggtgacagttagctcagcctctaccaaaggtccatccgtatttcccttggccccctgcagccgcagcacttctgagtccacagccgcactcggttgcctcgtcaaagattatttccccgaaccagtcaccgtgagttggaatagcggcgccctcacaagcggcgtacatacatttccagcagtgctgcagtcaagtggcctgtatagcctgagttctgtggtgaccgtgcccagctcctctttgggcaccaagacgtacacatgtaacgtggaccacaagccttccaatacaaaggttgataaaagagtcgagagtaaatatggtcctccatgccccccatgtcctgcgcccgagtttctcggtggcccatccgtgtttttgttcccccccaagccaaaagacacacttatgatttccaggactcctgaagtgacctgcgtggtggtggatgtttcccaagaggatccggaggtgcagttcaactggtatgtcgacggcgttgaggtgcacaatgcaaagactaagcctagagaagagcagttcaacagtacctacagggtggtaagtgtcctgacggtccttcaccaggattggctcaatgggaaagagtacaagtgcaaggttagcaacaagggactcccaagctcaattgaaaaaacaatatcaaaggccaaagggcagccacgagagccccaagtgtacacactgccaccatctcaggaggagatgacaaaaaaccaggtgagcctgacttgtctggtcaaggggttctatccaagtgacattgccgttgaatgggagagcaatggccagcccgaaaacaattacaagaccacacctcctgtgctggacagcgatggatcctttttcctttactcccggttgaccgttgacaaaagcagatggcaggaggggaacgtgttttcctgctctgtgatgcacgaggccctgcataaccactatacacaaaaatccctgtccttgagcctgggcaag

SEQ ID NO: 1131 - DNA, 1740 bp, synthetic construct
  misc_feature 1..1740: note = CD86 IgV-Q25I/F33L/H90V-sugemalimab antibody heavy chain polynucleotide
  source 1..1740: mol_type = other DNA
gctccgcttaagatccaggcctatttcaatgagaccgccgatctgccatgccaattcgcaaactctcagaacatttccctgagtgaactggtggtattgtggcaagaccaggagaacctggtgttgaacgaagtctacctgggcaaggaaaagtttgattcagttcacagcaaatatatgggcagaacaagttttgatagcgacagctggacccttcggttgcacaacctgcaaatcaaggataagggcctgtaccagtgcataatagtgcacaaaaagcccactgggatgattcggattcaccagatgaacagtgagctgagcgtgctggcaggcggcggcggatctggaggcggtggatctggcggcggggggtcaggcggcggcgggtctggtgaggtccagctgctggagtctgggggcgggctcgtgcaacctgggggcagcctcaggctgtcatgtgcagcttctgggtttaccttttcctcctatgctatgtcatgggtaagacaggcacccgggaagggtctcgagtgggtctcaggcatttctgggtccggtggttttacctattacgctgactctgtgaaaggacgctttaccatatctagagataactcaaaaaacaccctgtatctgcagatgaactccctgcgagccgaagacacagccgtatactattgcgcaaagccgcctagaggttataattacggaccattcgactactggggacagggaacccttgtgacagtgtcttctgcctccacaaagggtccctcagtgtttcctctcgccccatgcagcagatccacatcagagagcacggctgccctggggtgcttggtcaaggattattttcccgagcctgtgacagtgagctggaattccggagctttgactagtggcgtacatactttcccggccgtgcttcagagcagcgggctgtatagcctgagttccgtagtgaccgtgccttcatctagtctgggcactaagacctacacttgtaatgtggatcataaaccttcaaacacgaaggtcgacaaaagggtggagagcaaatatggccctccttgtcccccttgtccagcccccgagttcctgggcggaccatcagtgtttctgtttccccctaaaccaaaagatacgttgatgatctctagaacccctgaggtcacttgcgtggtcgtggacgtgtcccaggaggatccggaggtgcagtttaattggtacgtggacggagttgaagttcacaacgcaaagactaagcctagagaggagcagtttaacagcacataccgcgtagtgtctgtcctgaccgttctgcaccaggactggctcaacggtaaagagtataaatgtaaggtcagcaataagggtctgccaagcagcatcgaaaagaccatttcaaaggcgaagggccagccacgcgagcctcaagtgtataccctcccacccagccaggaagagatgacaaaaaatcaggttagcttgacctgtctggtaaaggggttttacccctccgacattgccgtcgaatgggaatctaacggacagcccgagaataattataaaaccacaccaccagttctggactctgatggctcttttttcctctactcccgactgaccgtcgacaagagtaggtggcaggagggtaacgtctttagctgcagcgttatgcacgaggccctgcacaaccattatacacagaaatccctgagcctgagtctggggaag

SEQ ID NO: 1132 - DNA, 1740 bp, synthetic construct
  misc_feature 1..1740: note = CD86 IgV-Q25V/F33L/H90V-sugemalimab antibody heavy chain polynucleotide
  source 1..1740: mol_type = other DNA
gcccccctgaaaatccaggcctattttaatgagacagctgatctcccttgtcagttcgccaattcccagaacgtctctctctctgagctggtcgtgctttggcaggatcaggagaatttggtgcttaacgaagtgtatctcggcaaggaaaaattcgactctgtccacagcaagtacatgggcagaacgtcctttgactcagatagctggacactgagactgcacaatttgcaaatcaaggataagggcttgtatcagtgcatcatcgtgcacaagaaacctaccggaatgatccgcatccaccagatgaatagtgagctcagcgtgttggccggcggcggtgggtccggaggaggtggaagtgggggtggtggcagtggtggaggtggaagcggggaagtgcagctgttggagagcggcggcggactggtccagcccggtggcagcttgaggctcagctgcgccgcttccggattcacgttcagtagctacgctatgagctgggtgaggcaagcaccagggaagggcctggaatgggttagcggtatttccgggtcaggcggctttacttactatgcagactcagtcaagggcaggtttaccatctctagagacaatagcaagaacaccttgtacctccagatgaactccctcagggctgaggatacagccgtgtattattgtgccaagcccccccggggatacaactacgggccatttgactactgggggcagggcacccttgtcactgtgagcagtgccagcacaaaagggcccagtgtgtttccactggcgccctgcagcagaagcacgtccgagagtacagctgcattgggctgtctggtgaaggattattttcccgagcctgtgacggtcagttggaacagtggtgccctgacctctggggtccatacattcccagctgttctccagagcagcgggctgtattctctttcttccgtggttaccgtaccttccagcagccttgggaccaaaacgtatacctgcaacgtggaccataaaccttcaaacactaaggtagacaagagagtggagagcaagtacggtcctccctgtcctccttgtcccgcgcccgaattcctggggggaccttctgtttttttgtttccccccaaaccgaaagatacactcatgatcagtcgcacaccagaggtgacatgcgtggtggtggacgtgtcacaggaggaccccgaggttcaattcaactggtacgttgacggggtggaagttcacaatgccaaaaccaaaccacgcgaggaacagttcaactctacctatcgagtggtgtcagttctcaccgttctgcatcaggactggctcaatggcaaggaatataaatgtaaagtttcaaacaaggggctcccaagcagcattgagaagaccatcagtaaggccaagggacagcccagggaacctcaggtgtatacactgccccccagccaagaggaaatgactaagaatcaggtgagccttacgtgtctggtgaagggcttttatcccagcgatatcgcggtggaatgggagagcaatggacagccggaaaataattacaagaccacgccaccagtgctggattctgatggtagcttctttctgtactccaggctgacagtggacaagtctcggtggcaagagggtaacgtgttttcttgctcagtgatgcacgaggccctgcacaatcactacacacaaaaatccttgagtttgagtctggggaag

SEQ ID NO: 1133 - DNA, 1740 bp, synthetic construct
  misc_feature 1..1740: note = CD86 IgV-Q25I/F33V/H90V-sugemalimab antibody heavy chain polynucleotide
  source 1..1740: mol_type = other DNA
gcaccattgaagattcaggcctactttaacgaaaccgccgatcttccttgtcagtttgctaattcacagaacattagcctgtccgaactggttgtggtgtggcaggatcaagaaaacctggtgctcaatgaagtctatcttgggaaagagaagttcgattcagtccactctaaatacatgggaaggaccagctttgatagtgacagttggaccctgcgcttgcataacctccaaatcaaggataaagggctctatcagtgtataattgttcacaaaaagcctacaggcatgatacgcatacatcaaatgaacagtgagctctccgtgctggccgggggcggtggctctggaggcggcggttccggcggcggagggtccgggggcgggggctcaggagaagttcagctgcttgaaagtggaggtggactggtccagccaggcggcagcctgagactgtcctgcgccgcctctgggtttacatttagctcatatgccatgtcctgggttcgccaggcgcccggaaaaggattggagtgggtttccggcatcagcggatccggcggcttcacttattacgcagacagcgtgaaaggtaggttcaccattagcagggacaactctaagaatactctgtaccttcaaatgaattctctgcgcgctgaggataccgctgtctattattgtgctaagcctccaaggggatacaattacggcccctttgactattggggccagggaaccttggtgaccgtgtcatctgcctcaactaaggggccttccgtgtttcccctcgccccctgctctcgcagcacatccgagagtaccgcagcgctgggctgtctggttaaagactattttcctgaaccggtgaccgtgagctggaacagtggcgctctgactagtggggtgcacaccttcccggctgtcttgcagtcctccggtctctacagtctctcttcagtagtgaccgtgccctcttccagcctggggacaaagacctacacctgtaacgtcgaccataagccctctaacacaaaggtagataaacgcgtcgaatccaaatatggacctccctgccccccctgccctgcccctgagttccttggaggaccatccgtttttctgttccctcccaagcccaaggataccctcatgatctcaagaactccagaggtgacgtgcgtggtggtggatgtgagccaagaagaccccgaggtgcaatttaattggtacgtggatggggttgaggtgcacaacgctaaaaccaagccaagggaggaacagttcaactccacctacagagtagtctccgtgctgaccgtcctgcaccaggattggctgaatggcaaggagtacaaatgtaaagtgagcaacaaagggctgccctcctcaatcgagaaaacaatctccaaagcgaagggccagcccagagaaccacaggtgtacacactgccaccctcccaagaggaaatgacaaaaaaccaggtctccctcacctgtctggtgaaaggtttctacccctcagatatagctgtggaatgggaatctaacgggcagcctgagaataactataagacgactcctccagtccttgacagcgatgggagcttttttttgtacagtagactgaccgtggacaaatcacggtggcaggaaggaaatgtgtttagttgctctgtcatgcatgaagccctccataatcactacacacagaagtccctgagtctttctctgggaaag

SEQ ID NO: 1134 - DNA, 1740 bp, synthetic construct
  misc_feature 1..1740: note = CD86 IgV-Q25V/F33V/H90V-sugemalimab antibody heavy chain polynucleotide
  source 1..1740: mol_type = other DNA
gccccactcaaaatccaggcctactttaatgagacagctgatctcccttgccaattcgccaatagccagaacgtgtcactgagcgaactggtcgtggtatggcaggaccaggaaaacctggtgttgaacgaggtatacctgggaaaagagaagttcgattccgtgcactcaaagtacatggggcggacgtccttcgactccgatagctggacactccggctccataaccttcaaattaaggacaaaggtctgtatcagtgcattatcgttcataaaaagcctacaggaatgatccgcatccaccagatgaatagtgagctgtccgtgctggccgggggcggcggaagcggggggggtggctctggaggtgggggctccggtgggggcggctccggtgaagtgcagctgttggagagcggcggcggactggtgcagccgggaggcagcctcaggctcagctgcgcggcctccggctttacatttagcagctatgcaatgtcctgggtcaggcaagcacccggtaaaggcctggaatgggtcagcggaatctccggctccggcggttttacctattacgccgattctgtgaagggtaggttcaccatctcccgagacaactctaaaaatactctctacttgcagatgaacagcctcagagcggaagataccgccgtctactactgtgcaaagcccccccgaggatataactacggtcccttcgactattggggtcaggggacattggtgacagtgagcagtgcctcaacaaaggggcccagcgttttccctcttgccccttgttcccgcagcacctccgagtcaaccgccgcacttggctgcctcgtcaaggattattttcccgagccggtcacagtgtcttggaacagcggggcccttacctccggcgtgcatacatttccagccgttctccaaagctccggactgtactctctcagcagcgtggttaccgtcccatcatctagcctgggaacaaagacctacacctgcaacgtggatcacaagccatccaacactaaagtagataagcgggtcgaatctaagtacggccccccgtgtcctccctgtcccgccccagaattcctgggcgggcctagcgtctttctgtttccgccaaagcccaaggacacacttatgatttccagaacacccgaagtcacatgcgtagttgtcgatgttagccaggaggatcctgaggtccagttcaattggtacgtggatggcgtagaggtccataatgccaaaacgaaaccgcgggaggaacagttcaacagcacatacagagtggttagtgtgctgacagttctgcaccaggactggctcaacggcaaggagtacaaatgtaaagtcagcaataagggactgccctccagtatcgaaaagacaatctctaaggctaagggtcagccaagggagccccaggtttatacactccccccctcccaggaggaaatgaccaagaatcaggtctccttgacttgcctcgttaagggattctacccttctgatatcgcagtggaatgggagtccaacggacagcctgagaataactataaaaccaccccccccgtgttggattccgatggctcttttttcctgtatagccggctcaccgtcgacaaaagtcgctggcaagagggcaatgtatttagctgctctgtgatgcacgaggctctccataaccattacacgcaaaaaagtctgagtctgagcctgggaaaa

SEQ ID NO: 1135 - DNA, 1740 bp, synthetic construct
  misc_feature 1..1740: note = CD86 IgV-Q25I/H90I-sugemalimab antibody heavy chain polynucleotide
  source 1..1740: mol_type = other DNA
gccccacttaaaatccaggcgtacttcaacgagaccgctgatctgccctgccagtttgcaaattcccagaacatttcactgagcgagcttgtcgtcttctggcaggaccaggagaatctggtgttgaacgaagtgtacctcggcaaggagaagtttgactctgtgcacagcaagtacatgggaaggaccagcttcgactccgactcttggacattgaggctgcataatctccagattaaggacaaaggtttgtatcagtgtatcattatccacaagaagcctaccgggatgattcgaattcaccagatgaattccgagctgtctgtcttggccggcggcggaggtagcggaggaggggggagtggtggaggcggatccggggggggtggatccggagaagtgcagctgctcgaatcaggcggcggtctggtccagcctggcggcagcctgaggctgtcctgcgctgcatctggcttcacgtttagctcttatgccatgtcctgggtgcgacaggccccagggaagggtctcgagtgggtctcaggcatctctgggagcggtgggttcacttattacgcagatagcgttaagggaaggtttaccatcagcagggacaactccaaaaacacgctgtacctgcagatgaactcactgagagcagaggatactgctgtgtactactgtgccaaacccccacggggctacaactacggaccgttcgactattggggacaggggaccctggttaccgtcagctcagccagcacaaaaggacccagcgtgtttcctcttgcaccctgctctcggtccactagcgagtccactgccgctctgggctgtctcgtcaaggactactttcccgagccggtgactgtgagctggaactctggcgccctcactagcggggtgcacacgttcccagcagtgctgcagagctcagggttgtattctctctcctcagtggtgacagtgccatcatccagtctgggtactaagacgtacacctgcaatgtggaccacaaaccttccaacacaaaagtggataaacgggtagagtcaaagtacgggccaccttgcccaccatgccccgcccctgaattcttgggcggccctagcgtatttctgttcccccccaagccgaaggacaccctgatgattagtaggactcctgaagtgacatgcgtggtggtggacgtttcacaggaggatcccgaggtccagtttaattggtatgtggacggcgtcgaggtgcacaacgccaagactaagccccgggaagaacagtttaacagtacatacagggtggtctctgtacttaccgtgctgcaccaggactggctgaatggcaaggagtataagtgtaaggtgtctaataaaggtctcccctcctccatcgaaaagactatcagtaaggcaaagggacaacctcgagagccccaggtgtacaccttgcccccatcacaggaggaaatgacaaagaatcaagtatctctgacctgtctcgtgaagggcttttacccctccgatatcgctgttgagtgggagagtaatggccagccagagaataattacaaaactacccccccagtgctggactctgacggatctttcttcctgtattcacgcctgactgtagataaaagtaggtggcaggaaggcaatgttttttcttgttcagtcatgcatgaggccctgcacaatcattatactcagaaatccctctctttgtccctcggaaag

SEQ ID NO: 1136 - DNA, 1740 bp, synthetic construct
  misc_feature 1..1740: note = CD86 IgV-Q25V/H90V-sugemalimab antibody heavy chain polynucleotide
  source 1..1740: mol_type = other DNA
gcgcctcttaagattcaagcctatttcaatgagactgccgatctcccttgtcaattcgctaattcccagaacgtgagcctcagcgagctcgttgtcttctggcaggatcaggagaacctggtgttgaacgaagtttatctcggcaaagagaagtttgactcagtacacagcaaatacatgggaaggacttccttcgacagcgactcatggacattgaggctgcataatttgcagatcaaagacaagggcctgtaccaatgcataattgtgcacaagaaacccacaggtatgattcggatccatcaaatgaattcagaactgtccgtgctcgcagggggggggggctctgggggtggcggctctggcggcggaggcagtggcggagggggctcaggcgaagtccagctgttggagtctggaggcggcctggttcagccgggcggaagtctgcggcttagctgtgccgcatccggattcacattcagtagctatgctatgagctgggtgagacaggcgcctggcaaggggttggaatgggttagcgggattagtgggtcaggtggattcacctactatgccgattcagtgaagggtcgctttaccatcagccgagataacagtaaaaacaccctgtacctccagatgaactccctgagagcagaggacaccgccgtttactattgcgctaagccccctagaggctacaactatgggcctttcgactattggggccaggggaccctggtgactgtcagtagcgcctcaactaagggaccctctgtgtttcccttggcaccatgctctcggagcacttcagaatcaaccgcggctctcggctgcctggtaaaagactactttcccgaacctgttacagtaagctggaactccggcgccctcaccagcggagtgcatacatttccagctgtgcttcagtcttctggcctgtacagcctgagcagtgtcgtgaccgtgccgagtagttccttgggcacaaaaacctacacgtgtaacgtggaccacaaaccaagcaatactaaagtggacaagcgggtcgagtcaaagtacggccctccatgccccccttgtcccgctcctgagttcttggggggaccctctgttttcctcttccctccaaaaccaaaagacacactgatgatctctcggacccctgaggttacatgcgtcgtggtggacgtgtcccaggaggatcctgaggtgcagttcaactggtacgtggatggcgtcgaggtgcacaatgctaaaactaagccgagagaggagcagtttaattctacttatcgggtggttagcgtcctgacagtgttgcaccaggattggctgaacggtaaagagtacaagtgtaaggtctcaaacaagggcctgccctcaagcatcgagaagaccatttcaaaggccaagggacagccccgggaaccccaagtatataccctgccccccagtcaggaagagatgactaaaaaccaggtgtctctgacatgccttgtgaaagggttctatcccagcgacatagctgtggagtgggaaagtaatgggcagccagaaaacaactacaaaactactccccccgtgctggactccgatggcagtttctttctctactctcgcttgactgtggacaagagtaggtggcaggaaggcaacgtgttctcttgtagtgtaatgcatgaggctttgcacaatcactacacacaaaagtcactgagtctcagcctgggaaag

SEQ ID NO: 1137 - DNA, 1740 bp, synthetic construct
  misc_feature 1..1740: note = CD86 IgV-Q25V/H90I-sugemalimab antibody heavy chain polynucleotide
  source 1..1740: mol_type = other DNA
gcccccttgaagatccaggcttatttcaatgaaacagctgatttgccctgtcagtttgcgaactcccaaaacgtcagcctgtctgagctggtggtgttttggcaggaccaagaaaatcttgtgctgaacgaagtctacctgggcaaagagaaatttgatagcgtgcactccaagtacatggggaggaccagtttcgattctgattcatggactcttcgccttcataatctgcagattaaggataaggggctgtaccagtgcatcatcattcacaaaaaacccaccgggatgatcaggatccaccagatgaatagcgaactgtccgtactcgccggcgggggagggtcaggaggcgggggatccggaggtggcggttccgggggtggcggaagcggagaggtgcagctgctggagtccgggggcggcctggtgcagcccgggggaagtctgaggctgtcctgcgcggctagcgggtttaccttcagttcctacgctatgtcctgggtgagacaggcacctggcaaggggcttgaatgggtgagcgggatatcagggtcaggcggctttacttactacgctgacagtgtcaaggggcggttcacaatatcccgcgacaattccaagaacacactgtacctgcagatgaactccctccgcgcagaggacaccgcagtctattactgtgcaaaaccgcccagaggctataattacggccccttcgattactggggtcagggaacccttgtgactgtctccagcgcaagcacaaagggcccgagtgtctttccccttgccccatgcagccgctctaccagcgagagtaccgccgctctgggatgcctggttaaggactactttcctgagccggttacagtgtcatggaactctggcgcattgacgtctggcgttcatacttttcctgccgtcctgcagtcatccgggctgtactctctgagctctgtggtgacagtgccaagctcatctctggggaccaagacttacacttgcaacgtggaccacaaacccagcaataccaaagtcgacaaaagagtggagtcaaaatatggtccaccctgccccccctgccccgcgcctgagttcctgggggggccctccgtgtttctcttcccaccgaagcctaaggacacactcatgatcagtcgaactcccgaagttacctgcgttgtggttgatgtatcccaggaagatcccgaagtgcagtttaactggtacgttgacggagtggaggtgcacaatgcaaaaacaaaacctagagaggagcagttcaatagcacataccgagtggtgagcgttctgaccgtgcttcaccaggactggctcaatggaaaggagtataaatgtaaggtgtctaacaaagggctgcctagtagcatcgagaagacaatatcaaaagccaaagggcagccaagagaacctcaggtttacaccctgcccccgagccaagaggagatgaccaagaatcaggtgtctctcacttgtctggtcaaggggttttatccatctgacattgcagtggagtgggaatccaacgggcaacccgaaaacaactataagacaaccccccccgtgcttgatagcgatggttcctttttcctgtatagtcgcctcactgtggataagtccagatggcaggagggaaatgtgttttcatgcagcgtcatgcacgaagctctgcataatcactacacccagaaatcccttagcctttccctgggcaaa

SEQ ID NO: 1138 - DNA, 1740 bp, synthetic construct
  misc_feature 1..1740: note = CD86 IgV-sugemalimab antibody heavy chain polynucleotide
  source 1..1740: mol_type = other DNA
gcccctttgaaaatccaggcctattttaatgaaacagctgatttgccctgccagtttgccaatagtcagaaccagtccctgtctgagcttgtagtgttctggcaggaccaggaaaaccttgttctgaacgaggtgtatcttggaaaagagaagttcgatagtgttcattctaaatacatgggcaggacatcatttgacagcgactcttggacactgagactgcataacttgcagatcaaggacaaggggctgtatcagtgtatcattcaccacaagaaacccacggggatgatacgaattcatcagatgaacagcgagctgtccgtgctggctgggggcggaggaagtggtggcggtggaagtggaggggggggcagcgggggcgggggcagcggggaagtgcagctccttgagtcaggcgggggtttggtacagccaggaggcagccttaggttgtcttgcgccgcaagcggcttcaccttctctagctacgctatgagctgggtccgccaggcccctgggaagggccttgagtgggtgagtggtatcagcggatcaggagggttcacttactatgctgattccgtcaaaggacggttcactatttccagggacaacagcaaaaatacactgtacttgcaaatgaatagcctgagagctgaggacactgccgtgtactactgtgctaagccgccccgcggttacaattacgggccattcgattattggggacaaggcacgctggtgacggtgtccagcgcctccaccaagggccccagcgtgttccccctcgcaccctgctctagatcaacctccgagagcactgcagcccttggatgtttggtgaaggactactttcctgaacccgtgacagtgagctggaacagtggcgccctgacttccggcgtccatacttttcctgctgtactccagagcagtgggctttattccctgtcctctgtggtcactgtgccatcctctagcctgggtaccaagacttatacatgtaatgtggatcacaagcccagcaacactaaggtcgacaagcgggtagagtccaagtacgggcccccctgcccaccctgccccgcccccgagtttctcggagggccaagtgtgtttctctttcctcccaaaccaaaagacacactgatgatttccaggacacccgaggtgacttgcgtggtcgttgatgtgagccaggaagatcccgaagtacagttcaactggtatgtggacggagtggaggtacataacgcaaaaactaagcccagggaggaacagttcaatagcacgtacagagtcgttagcgtgctcacagtgctccaccaagattggctgaacgggaaagagtacaaatgcaaagtgtccaataaaggtctgccctctagcattgaaaagacaatctccaaggcaaaaggacagccaagagagcctcaagtgtataccctgcccccatcacaggaggagatgaccaagaatcaggtgagcctcacttgcttggtgaagggattttaccccagcgatattgctgtcgagtgggaaagcaacggacaacccgagaacaattataagacaacaccccccgtactggacagtgatggaagcttctttctgtactcaaggctgacggttgataaatcacgctggcaggagggaaatgtgttctcctgttctgtgatgcacgaggccttgcacaaccactacacccaaaaatccctctctctgtctctgggcaaa

SEQ ID NO: 1139 - DNA, 1935 bp, synthetic construct
  misc_feature 1..1935: note = LAG3 112-156-sugemalimab antibody heavy chain -CD86 IgV-Q25I/F33L/H90I polynucleotide
  source 1..1935: mol_type = other DNA
ggaagacttcctctccagcctagagttcagcttgatgagagagggagacaaaggggggacttttcactctggttgagacccgctagaagagctgacgccggagagtacagagcggcagttcacctgagagatagaggaggaggaggaagtgggggtggaggaagcggaggtggtggatcaggaggaggtggctctggcgaagtgcaactgcttgagagtggaggaggcctcgttcaacctggcggaagtctcagactgtcttgcgcagcttctggattcacattcagcagttacgccatgtcctgggttagacaggcacctggaaaaggcctggaatgggtgagcgggatctctggttccggagggtttacttactacgccgactctgtaaaagggaggttcacaatctctagagacaattcaaagaatactctgtatctccagatgaattccttgcgcgccgaagacacggctgtgtattactgtgcgaagccccccaggggctataactatggacccttcgattactggggacaggggaccctggttactgtctcttcagcttcaacaaaaggcccgagcgtgtttcctcttgccccgtgtagcagaagtacctctgaatcaaccgccgccctgggttgtttggtgaaagactattttcctgagccagtcaccgtgtcatggaattctggagctctgacatccggggtacatacattccctgccgtcctgcagtcctctggattgtattccttgagcagtgtggtgactgtacctagcagttctctgggaaccaagacctacacctgcaatgtggaccacaaaccctccaacacgaaggtcgataagcgagtggaatcaaagtatggaccaccatgtccaccttgtcccgctcctgagtttttgggaggcccaagtgtgttcctttttccacccaaacccaaggatacacttatgatttccaggacaccggaagtgacctgcgtggtagtcgacgttagtcaagaggaccccgaggtgcagttcaactggtacgtggatggggtagaagttcataatgccaagaccaaaccacgcgaggagcaatttaactcaacctatagagttgtttcagtgctgactgtgctgcatcaggattggctgaacgggaaagaatataagtgtaaggtgtcaaataaggggctgccctcttcaatcgagaagaccatctccaaggccaaagggcaacctagagagccgcaggtctatactttgccaccatctcaagaagagatgaccaaaaaccaagtcagtctgacatgtctggtgaagggcttctatcccagcgacatcgcagtggagtgggagtcaaacggccagcccgaaaacaattacaaaactaccccacctgtactcgatagcgacgggagcttctttttgtatagcaggctgactgtcgacaagtcccgctggcaggaagggaatgtattcagctgctctgtgatgcatgaggcgcttcacaatcattatacacagaagagtctctcactgtcacttggggcaggaggaggaggttcaggtggtggtggatctgggggtggtggatcaggaggaggcggaagtggggcaccactgaagatccaggcctatttcaatgaaacagctgatctcccctgccagttcgctaactcacagaacatcagcctcagcgagctcgtcgtgctgtggcaggaccaggagaacctcgtgctgaatgaggtctacctggggaaagaaaaattcgatagcgtgcactccaagtatatgggtagaacatcctttgactctgactcatggactttgcgactccacaatctgcagattaaagacaaaggcctctatcagtgtatcatcatccacaagaagcctaccggaatgatcagaatccatcagatgaacagcgagctgtcagtgctt

SEQ ID NO: 1140 - DNA, 1935 bp, synthetic construct
  misc_feature 1..1935: note = LAG3 112-156-sugemalimab antibody heavy chain -CD86-IgV-Q25V/F33L/H90I polynucleotide
  source 1..1935: mol_type = other DNA
ggaaggctgccactgcagcctagagtccaattggatgaaagaggaaggcaaaggggggattttagcctgtggcttcgacctgccagaagagctgatgcaggcgagtatagagccgctgtgcacttgagagacagagggggaggaggaagtggaggaggaggatctggaggtggaggaagtggaggaggtgggtctggcgaagtccagctccttgagtctggcggtggccttgtacagccaggaggctctttgaggctgtcttgtgccgctagcgggtttaccttttccagctatgccatgtcatgggtcagacaagcacctggaaagggactggaatgggtctctggcatatccggaagcggaggcttcacctattacgcggacagtgtgaaaggacgctttaccataagcagggacaacagcaaaaataccttgtatctgcagatgaactcactccgggctgaggacaccgccgtctactattgcgcgaagcctccgagaggctacaattacggcccctttgactattggggccagggtactctcgttaccgtgagctccgcctccacaaaggggccttccgttttccctcttgcgccatgctcccggtcaactagcgagtcaaccgccgcccttggatgcctcgttaaggattatttcccagagccggtgactgtgagttggaactcaggagccctgacttcaggcgttcacaccttccctgccgtgctgcagagctctggactgtatagcctgagtagcgtggtgacagtgccatcttctagtctgggcaccaagacctacacttgtaacgtggaccacaaacctagcaatactaaagtggacaagagggtcgagagcaaatatggccctccttgtccaccatgccctgcacctgagtttctcggaggaccgagcgtattcctgttccctcctaaacccaaagatactctgatgatatcacggacccctgaagtgacgtgtgtggtggttgacgtgtctcaggaagaccccgaggtccaattcaattggtacgtggacggcgtggaggttcataatgccaagactaagccacgggaagagcagttcaacagtacatatcgggtggtgagcgtcctgacagtcctgcatcaagattggctcaatgggaaggagtacaagtgcaaagtgtccaacaagggccttccatcctcaatcgaaaagacaatttcaaaagctaaaggccagccacgcgaacctcaggtctacactctgcccccatctcaagaggaaatgacaaagaaccaggtgtccctgacgtgcctggtgaagggcttctatccctccgacatagcggtggaatgggaatccaacggccaacccgaaaacaattataagacaactccccccgttctggacagcgatggatcattctttctgtatagcagattgacagtcgacaaatcacggtggcaggagggaaatgtgtttagctgtagcgtcatgcatgaggccctgcataaccattacacacagaagtcattgtccttgtctcttggagctggtggtgggggatctggaggaggtggaagcggaggaggaggatctgggggaggtggatctggggcacctttgaagatccaggcctatttcaacgaaaccgccgatctcccgtgtcagtttgccaactcacagaacgttagcctgtccgaactggttgtgttgtggcaggatcaggaaaacttggtgctgaatgaggtttacctggggaaggaaaagttcgacagtgtgcattccaagtacatgggccgcacctctttcgactccgacagctggacactccggttgcataatttgcagatcaaggacaagggactgtaccagtgtattatcattcacaaaaaacctaccggaatgattcgcatccatcagatgaactccgaactgtctgtgctt

SEQ ID NO: 1141 - DNA, 1935 bp, synthetic construct
  misc_feature 1..1935: note = LAG3 112-156-sugemalimab antibody heavy chain -CD86 IgV-Q25I/F33V/H90I polynucleotide
  source 1..1935: mol_type = other DNA
ggcagacttccactgcagccaagagtgcaattggatgaaaggggaagacagcgcggggatttctcactgtggctgagacccgctagacgcgctgatgctggcgaataccgagcagctgttcatctcagggatagaggaggaggaggaagtggaggcggtggctctggaggaggaggttctggaggagggggaagtggagaggtgcagctccttgagtctggaggcggcctggtacagcctggaggatcactgcgcctgtcctgcgctgctagtggcttcaccttttccagttatgccatgtcttgggtgaggcaggctccagggaaagggcttgagtgggtgagcggcatatcaggcagcggcggatttacctattacgcagacagcgtgaagggacgctttactataagcagggacaatagcaaaaacaccctgtacctgcaaatgaactctttgcgggctgaggacacagctgtctactactgcgccaagccgcccagagggtacaattatgggcctttcgactactgggggcagggcactttggtgaccgtcagctcagcctccactaaaggcccctcagtgtttcccctggcaccctgtagcagatctaccagtgaaagtactgcagctctgggatgcctcgtaaaggactatttcccagagccggtgacggtgtcttggaattccggcgcgctcacatcaggggtgcataccttcccagccgtactgcagtccagcggactctattctttgagcagtgtggtgacagtgccttcctcaagccttggaacgaagacctatacctgtaacgttgaccataaaccttctaacaccaaagtcgacaaacgagtggaatcaaaatacggtccaccgtgtcctccatgtccagctccggaattcctcggtggacctagcgtgttcctgtttccacctaagcccaaagacactttgatgatcagcagaactcctgaagtgacctgcgttgtggtggatgtgtcccaagaagatcccgaagtccagttcaattggtacgtggatggcgtggaagtgcacaatgccaagactaagccaagagaggaacagttcaattccacatatcgcgttgtcagtgtgctcaccgtcctgcatcaggactggcttaatgggaaggagtataagtgcaaagttagcaacaagggacttccatccagcattgagaagactatctctaaggcgaagggtcagccgagagaaccccaggtgtacactctccccccaagtcaggaggagatgaccaagaaccaggtgtcacttacctgtctggtcaaggggttttacccaagtgacatagccgtggagtgggaatctaatggtcaacccgagaataattacaagacaacaccgccggttttggattcagatggcagctttttcctttactcacggctgaccgtcgataagagtcgctggcaggaaggcaacgtgttcagctgctccgtgatgcacgaagctctgcacaatcactacactcaaaagtccttgtctttgagtttgggcgctggtggtggaggaagtggtggaggaggatctggaggtggtgggagcggaggtggtggatctggagcaccattgaagattcaagcctatttcaatgaaacggccgatttgccctgtcaatttgctaattcccagaatatcagcctgagtgagttggtggtcgtgtggcaagatcaggaaaacttggttctgaatgaggtatacctcggtaaggaaaagtttgacagtgtacattctaaatatatgggccggacgagctttgactctgactcatggacactgcggctgcacaatttgcagattaaagacaaagggctgtaccagtgtatcatcatccataagaagcccaccggcatgattcgcatccatcagatgaacagtgaattgtccgtgctg

SEQ ID NO: 1142 - DNA, 1935 bp, synthetic construct
  misc_feature 1..1935: note = LAG3 112-156-sugemalimab antibody heavy chain -CD86 IgV-Q25V/F33V/H90I polynucleotide
  source 1..1935: mol_type = other DNA
ggcagactgccgttgcaacccagagtccaattggatgaaagaggacgacaaagaggcgattttagtctgtggttgcgccctgccagaagagccgatgctggggaatacagagcagcagttcatctgagagatagaggaggaggtggatcaggaggaggaggatctggaggtggaggatctggtggaggcggaagtggagaggtgcagctgttggagagtggcggaggtttggtacaacccggaggctctctcaggctgtcctgtgcagccagcgggttcacttttagcagttacgccatgtcctgggtgagacaagcaccgggaaagggcctcgagtgggtgtcaggaatctccgggagcggtggtttcacttactacgccgattctgtgaaggggagatttacgatttctagggacaattccaaaaacacactctatctgcagatgaattctctgagggccgaggatactgcagtttattactgtgcaaaacccccaaggggatacaattatggaccattcgattactgggggcaaggcacacttgtcacagtcagttctgcctccactaaaggaccctccgtctttccactcgccccctgttctaggtctacctccgagtccacagccgcactgggctgtttggtgaaggactactttcctgagcccgtcacggtgtcttggaactccggtgcccttaccagcggagtccacacttttcccgctgtactgcagagctctgggctgtactcactcagctctgtggttacagtcccttccagctctctggggaccaaaacgtatacctgcaacgtggaccataaacctagcaacacgaaagtggacaaacgagtggaaagtaaatatggtcctccatgtccgccttgtcctgcgcctgaatttctcggtgggccctcagttttccttttcccacctaagcctaaggacacactgatgatctctcgaacacccgaggtgacttgtgtggtagttgacgtcagccaggaagaccccgaggtgcagtttaactggtacgtggacggagtcgaggttcataacgctaaaaccaagcctagggaagagcagttcaactctacatacagggtcgtaagcgtgctcaccgtcctgcaccaggattggttgaacggtaaggagtataagtgcaaggtctccaacaagggcctgccttcaagtatcgaaaaaacaatctcaaaggccaagggccagccaagagagccacaagtctacaccctgccaccgtcacaggaagagatgacaaagaaccaggtgagcctgacttgtctcgtgaagggcttctacccctccgatatcgcagttgagtgggagtctaacggtcagcctgaaaacaactataaaaccacaccccctgttctcgatagtgatggatcattcttcctctactccagactgacagtggacaagagccgctggcaggaagggaatgtgttctcttgttcagtcatgcatgaggccctgcacaatcactatactcagaaatcactgagcctctcccttggtgctggaggaggtggatctggaggaggtggaagtggaggtggtggaagtggtgggggagggagtggagctcctttgaagatccaggcttactttaatgagacagcagatctgccctgtcagttcgcaaattctcagaatgtttcactgtccgagcttgtggtggtgtggcaggaccaggaaaacctggttctgaatgaagtgtatctggggaaagagaaatttgacagtgtgcacagcaaatacatgggccgcaccagtttcgatagtgactcttggacactgagactgcacaatctgcagataaaggacaaaggactgtaccagtgcattatcattcacaagaaacctaccggtatgattcgcattcaccagatgaatagcgaactgagcgtgctt

SEQ ID NO: 1143 - DNA, 1935 bp, synthetic construct
  misc_feature 1..1935: note = LAG3 112-156-sugemalimab antibody heavy chain -CD86 IgV-Q25V/F33L/H90V polynucleotide
  source 1..1935: mol_type = other DNA
ggcagactcccacttcagccgagagtacagttggatgaaagaggaagacagagaggcgatttcagtctgtggttgagacctgctcgcagggctgatgctggcgagtatagagccgcagtgcatctgcgagatcgaggaggaggtggctctggaggtggaggtagtggaggaggaggttctggtggaggcggctcaggtgaagtgcaactgttggaatctggtggcggtctggttcaacctggtggatctttgagactgagttgcgcagcaagcggctttaccttctcctcatacgccatgtcatgggtaagacaagctcctggaaagggcctggaatgggtgtctggaatttccggctcaggaggctttacttattatgccgattctgttaaagggaggtttaccatcagtcgcgataatagcaagaataccttgtacctgcagatgaactcactccgggccgaggacactgcagtttactattgtgcaaaaccccctagaggctataattatggccctttcgattactggggtcaggggaccctcgtgacagtcagcagtgcgtccacaaaaggcccttcagtgttccccctcgccccatgttctcgctcaaccagcgagtccactgcggctcttggatgcctcgtcaaagactactttcccgagcctgtgactgtgtcttggaactcaggcgcgctgacaagcggtgttcatacatttcccgccgttctgcagagttccggactgtactcactctcatccgtcgttaccgttccttcatcaagcttgggaaccaagacctatacttgcaatgtcgatcacaagcccagcaataccaaggtcgataagcgcgtggagtcaaaatacgggccaccatgtccaccatgtcctgcacccgaatttctcggcggtccatctgtgttcctgtttccacccaaaccaaaggatacacttatgatttcaaggacccccgaggtgacctgcgtggttgtagacgtgtcccaagaagatcctgaagtgcagttcaactggtatgtggatggtgttgaagttcacaatgctaagacaaagccgcgggaagagcagttcaactctacttaccgggttgtgagcgtactgacggtgctgcaccaggactggctcaacggcaaagaatacaagtgcaaggtctccaacaagggactcccatcttcaatcgagaagacaatatccaaggccaaaggtcagcctagggagccccaggtgtataccctgcccccttcacaggaggagatgacaaagaatcaggtcagtcttacatgcctggtcaagggattctatccctcagatattgcagtggaatgggagagcaacggccagcccgagaataactacaagactaccccgccagtgttggacagtgacgggtccttctttctgtactccaggctgacagtggacaaaagccgctggcaggagggcaatgtgttctcttgctctgtgatgcatgaggccttgcacaaccattacactcagaagtcactgtccctctccttgggagctggaggtggagggagtggtggtggtggaagtggaggtggagggtctggaggaggaggatctggtgctcctctgaagatccaggcctacttcaacgagacggcagatttgccttgccagttcgcaaactcccagaatgtgagtctgtccgagctcgtcgtgctgtggcaggatcaggagaatttggtgctgaatgaagtgtacctgggcaaagagaaatttgattccgtgcattctaagtacatgggtaggacctcatttgacagcgactcatggactctgagactgcacaatctccaaattaaggacaaaggactgtaccagtgcatcatcgtccataagaaaccgactggtatgatccgcattcatcaaatgaacagcgaactgtctgtgctg

SEQ ID NO: 1144 - DNA, 1935 bp, synthetic construct
  misc_feature 1..1935: note = LAG3 112-156-sugemalimab antibody heavy chain -CD86 IgV-Q25V/F33V/H90V polynucleotide
  source 1..1935: mol_type = other DNA
ggtagactccctcttcagcctcgagttcagctcgatgaaagaggtagacagcggggcgactttagcctttggttgcggcctgccaggagagctgatgcaggagaatatagagccgctgtacatttgagagatagaggtggaggagggagtggcggtggaggatctggtggaggtggttctggtggcggaggaagtggtgaggttcagctcttggagagcggtggtggactggtccaacctggtggatctcttagactctcatgtgccgcaagcggttttacatttagtagctatgctatgagctgggtgagacaagcccccggtaagggtttggaatgggtgtccggaattagcgggtcaggaggtttcacctattatgccgattccgtcaagggcaggtttacaatcagtcgagataactcaaaaaataccctttaccttcagatgaattctctgagggccgaggacactgccgtctattattgtgccaagcctccccgcggatacaactacggcccttttgattactgggggcagggtaccctggtgaccgtgtctagcgctagcacaaaagggccctcagtgtttccgctggctccatgttctcgctccacctccgaatcaactgccgcacttggctgcctcgtgaaagactatttccccgagccggtgacagtaagctggaactcaggagccctgacaagcggcgtccacacttttcctgccgtcctgcagtccagcggcctgtatagcctgtcatcagtggtgacagtgccgtctagtagtctcggtacgaagacatacacttgcaatgtcgatcataaaccatcaaataccaaggtcgacaagcgggtggagtctaagtatggtcctccctgtccaccttgtcctgccccagaatttcttggaggcccaagtgtgtttttgttccctcccaaacctaaggatacactcatgatctctaggactccagaggtgacttgtgtggtcgtcgatgtgtcccaggaagatccagaggtgcagttcaattggtatgtcgacggagtggaggtccataatgcaaaaaccaaaccccgggaagaacagttcaactcaacgtacagggtcgtgtccgtgctcaccgtgttgcatcaggactggctgaacggtaaggaatacaaatgtaaagtgagtaataagggtctgccttcctccattgagaaaacaatttccaaagctaaaggccagcctcgagaacctcaggtgtatacattgccacccagtcaggaagaaatgaccaagaatcaggtgagcctcacgtgcctcgtgaaagggttctacccaagcgacatagcggtggagtgggagagcaatggacaacctgagaacaactacaagaccactcctccggtccttgactctgatgggtccttttttctgtatagtcggttgaccgtcgataagagccgctggcaagagggcaacgtgtttagctgctccgtaatgcatgaagctttgcataaccactatacacagaagagcctgtctttgtcactgggagcaggaggtggaggttctggaggaggtggaagtggaggtggtggaagtggagggggaggatcaggcgcaccactgaaaatccaggcctactttaatgaaactgcagatctgccatgccagttcgcaaacagccagaacgtcagcctttctgagctggtcgttgtctggcaggaccaggagaacctggtcctgaacgaggtttacctgggaaaggaaaaattcgactccgtgcactccaagtacatgggccgcacgtcctttgacagcgattcttggacactccgcctgcacaacctgcagatcaaggataagggactttatcagtgtattatcgtgcataaaaaacccactggtatgatccggatccatcagatgaacagtgagttgagcgtgctc

SEQ ID NO: 1145 - DNA, 1905 bp, synthetic construct
  misc_feature 1..1905: note = LAG3 122-156-sugemalimab antibody heavy chain -CD86 IgV-Q25I/F33L/H90I polynucleotide
  source 1..1905: mol_type = other DNA
cttgatgagcggggaagacaacgcggtgattttagcctctggcttagacccgccagaagagccgatgctggcgagtatcgcgctgctgtgcacctgagggaccggggtggcggcggctccgggggaggcggaagtggaggcggaggctctggcggtggaggatctggagaggtacagctgctggagtccggcggcggcctcgtccagccaggtggcagtctgaggcttagttgtgctgcctccggcttcactttctctagctacgcgatgagctgggtgcggcaggccccaggtaaggggctcgagtgggtgtccggcatctcaggcagtggaggcttcacctattacgcagattccgtgaagggccggttcacgattagtcgggacaacagcaaaaacaccctgtacctgcagatgaacagcctgcgggccgaggacactgccgtgtactattgtgcaaagccgcctcggggctacaactatggtccctttgattactggggccagggcacactggtaacggtctcttcagcctccaccaaggggcccagcgtctttcctctggccccctgtagcagaagcacctctgagtcaacagctgctctgggctgccttgtcaaggattactttcctgagcctgttactgtgagctggaacagtggagccttgactagtggggttcacacctttcccgccgtgttgcagtccagcggactgtattcattgtctagcgtggtgaccgtgcccagctcctccttgggcaccaaaacttacacctgcaacgtggaccacaagccatccaacactaaggtggacaaaagagttgagagcaagtacggcccaccttgcccaccttgccctgcaccagagtttttgggaggcccatccgtctttctgttcccacctaagcctaaggacaccctcatgatatcacgcactcctgaagtcacctgtgtcgttgtggatgtgtctcaagaagatcccgaagtccagttcaattggtacgttgatggtgtcgaggtacataacgcaaagacaaaaccaagggaagaacagttcaactccacctatcgggtggtttctgtacttacagtgttgcatcaagattggcttaatggaaaagaatacaaatgcaaggtgagcaacaaaggactgccttctagcattgagaagacaatcagcaaggccaagggccaaccaagggagcctcaggtgtacactctcccacccagccaagaggaaatgaccaaaaaccaggtgagcctcacctgtctggttaaagggttctacccgtcagatattgcagtggaatgggaatccaatggccaacccgaaaataattataagaccacacctcctgtcctggattccgatggatcttttttcctgtactcccgcctgactgtggacaagtcaagatggcaggaaggaaatgtgttcagttgctcagtgatgcatgaagccctgcacaatcattatacccagaaatccttgagtctttctttgggtgcgggaggcggaggcagcggcggtggtggaagcggcgggggaggttctggaggaggcggatctggagcacctttgaaaatacaggcctactttaacgagacagctgacctgccctgtcaattcgccaactcccagaatatcagtctttctgaactggttgtgctctggcaagaccaagagaatctggttctgaatgaggtttacttgggtaaggaaaagttcgattcagttcactccaaatatatgggtcggacttctttcgacagtgatagctggacactgcgcctccataacctgcagataaaggataaaggcctctatcagtgcataataattcataaaaaaccaaccggcatgattcgaatccatcagatgaatagtgaactgtcagtcctg

SEQ ID NO: 1146 - DNA, 1905 bp, synthetic construct
  misc_feature 1..1905: note = LAG3 122-156-sugemalimab antibody heavy chain -CD86-IgV-Q25V/F33L/H90I polynucleotide
  source 1..1905: mol_type = other DNA
ctggatgagagaggtaggcaaagaggagacttcagtctctggctgagaccagctagaagggctgatgcaggtgagtacagggccgctgtacacctgagagatagaggcgggggaggatccggagggggaggatcaggtggaggaggaagtggaggtggagggagtggggaagtgcagctgttggagtcaggcggtggtcttgttcagcctggcggaagtttgcggctgagttgtgctgcatcagggtttactttctcttcttatgccatgtcttgggtgaggcaagctccaggcaaagggctcgagtgggtttccggtatttcaggctcaggcgggtttacctattacgcagatagcgtcaaaggcaggttcaccatctctagggataactcaaagaacacactgtacctgcagatgaattcccttagggctgaagatactgcagtctactattgcgccaaaccaccgagggggtacaactatgggcctttcgactactggggccagggaaccctggtcaccgtaagcagcgcctcaaccaaaggaccatcagtgtttcctcttgccccttgttcaagaagcactagtgagtcaactgctgccctgggatgcctggtgaaagattattttcctgagcctgtgaccgtcagctggaatagcggagcattgacgtccggagtgcacactttcccagccgtccttcaatctagtggactgtacagcctctcaagcgttgttaccgtcccatcatccagcttgggcacgaagacttacacctgcaatgtggatcacaaaccatctaacacgaaagtggataagagagtggaaagcaaatacggtcccccatgcccaccttgtccagctccagagttccttggcggaccatctgtgttcctgttcccacccaaaccaaaagacacactgatgattagtcgcacaccagaagtgacttgtgtggtggtcgacgtgtcccaagaagaccccgaggtacaatttaactggtacgtggatggggtcgaggtacataacgccaagaccaaacctagggaagaacagtttaactcaacatatcgagtcgtcagcgtgctcaccgtactgcaccaggactggctgaacggcaaggaatataagtgtaaggtgtcaaacaagggcttgccttcttccatcgagaaaactatcagcaaagctaagggccagccccgggaacctcaagtgtataccctgccaccctctcaggaggagatgactaagaaccaggtgtcactgacttgccttgtcaaaggcttttacccatctgacatcgctgtcgagtgggaatctaacggacagcctgagaacaattacaagaccacaccaccagtgctggattctgatggctcattttttctgtattctcgcctgaccgtggacaaatcacggtggcaggagggaaatgtattctcctgtagtgttatgcatgaggctttgcacaaccactacacacagaagtccctgagcctctctctcggagctggaggtggtgggtctggaggtggtggatctggtggaggaggttctgggggaggaggatcaggagctcctcttaagattcaagcctatttcaatgagacagccgatctcccgtgccaattcgccaactcccagaatgtttctctctctgaattggtggtgctttggcaggatcaagaaaatctggtattgaacgaggtgtatctgggtaaggagaaattcgactccgtgcattcaaagtacatgggccggactagctttgattctgactcttggacgttgcgcctgcataatttgcagattaaagacaaaggcctgtatcagtgcattattatccataaaaagcctaccggtatgattcgcattcaccagatgaactcagaattgtctgtgctg

SEQ ID NO: 1147 - DNA, 1905 bp, synthetic construct
  misc_feature 1..1905: note = LAG3 122-156-sugemalimab antibody heavy chain -CD86 IgV-Q25I/F33V/H90I polynucleotide
  source 1..1905: mol_type = other DNA
cttgacgaaagaggccgacagagaggcgactttagcctttggcttaggccagcacgcagggcagatgcaggggaatacagagcagccgtccacctgagggatcgaggaggaggtggatccggaggtggaggatctggaggtggaggatcaggcggtggaggaagcggagaggttcaactcctcgaatcaggaggtggcttggtccaaccaggtggaagcttgaggctgtcatgcgctgccagtggctttacatttagcagctacgccatgtcttgggttagacaggcccctggcaaaggcctcgaatgggtaagcgggatttccggatctggcggtttcacttactatgctgattcagtcaagggccgcttcaccatcagcagggataactccaagaatactctgtacctccagatgaacagcctgcgcgcggaggatactgccgtttattactgcgctaagccaccccggggttataactatggcccttttgattactggggccagggtactctggtgactgttagttcagcatcaacaaaggggcctagcgtctttccactggcgccatgtagccggtctactagcgagagtactgcagccctgggctgtttggtcaaggattactttcccgagcctgttacagtctcttggaattccggcgcactgacatccggggtacatacctttcctgccgtgctgcaaagcagcggcttgtatagcctttctagcgtggtgacagtgccatcttcaagcttggggaccaagacttacacttgcaatgttgaccataaacctagtaacacaaaggtagacaagcgcgtagagtccaaatatggacctccatgtcctccatgtcctgctcctgagttcctgggaggaccttctgtgttcctgttccccccgaaaccgaaggacaccctgatgatctctagaacacctgaagtgacatgcgtcgtggtggacgtgagccaggaggaccctgaagtccagttcaattggtacgtggacggcgtagaggtccacaacgcaaagaccaagccacgggaagaacagttcaactcaacgtatcgcgtggtgtccgtcctgaccgtcctgcatcaggattggcttaacggaaaagaatacaagtgtaaagtctccaacaagggcctcccgagcagcatcgaaaaaaccatcagtaaggccaagggacagcctagggagccccaagtgtatactttgccaccatcccaggaggagatgaccaagaatcaggtaagcctgacctgcctggtgaaagggttctaccctagcgatatcgccgtggaatgggagagcaatggccagcccgaaaacaattacaaaaccaccccacccgtactggatagcgatggaagcttttttctttatagtaggctgaccgtggacaaatcaaggtggcaggaggggaacgtctttagttgtagtgtgatgcatgaggctcttcacaatcactatacccaaaaaagcctttcactttcattgggtgctggtggaggaggttctggaggtggtggatcaggaggaggtggctcagggggaggaggttctggtgctccacttaagatccaagcatactttaacgagacagccgacctgccatgtcagtttgcaaacagccagaatattagtcttagcgaactcgtagttgtgtggcaagatcaggagaacttggtgctgaatgaggtctatctgggcaaagagaagttcgactcagtccacagtaaatacatgggccgcacatccttcgactccgactcctggacactccgccttcataacctgcagattaaggataagggattgtatcagtgcatcatcatccataagaagccaactgggatgattaggattcaccagatgaacagtgaactgagcgtgctc

SEQ ID NO: 1148 - DNA, 1905 bp, synthetic construct
  misc_feature 1..1905: note = LAG3 122-156-sugemalimab antibody heavy chain -CD86 IgV-Q25V/F33V/H90I polynucleotide
  source 1..1905: mol_type = other DNA
ttggacgagagaggaaggcagagaggggattttagcctttggctccggcccgccagacgcgcggatgccggggaatacagggctgccgtgcatctcagagaccgcggcgggggagggagcggaggcggtggaagcggcggaggaggcagcggaggaggaggaagcggcgaagtccagctcctggagtcaggaggagggttggtgcagcccgggggttccctccggttgagttgcgccgctagcggatttaccttcagcagctacgcaatgtcttgggtaagacaggccccaggaaaagggctcgaatgggtttccggcatctctggctccggtggcttcacctactatgccgactctgtaaagggtaggttcacaatctccagagacaatagcaagaacaccctctatctccagatgaacagtcttcgcgctgaggataccgctgtctactattgcgctaaaccccctaggggctataactatgggcccttcgattactggggtcagggcactctggtaacggtgagttccgcttcaaccaaaggtccgtccgtattccctttggctccttgcagcaggtctactagcgaatccacagcggcgctcgggtgtctcgtaaaagattattttcctgagcccgtcaccgtgagttggaactctggtgcactgactagcggagttcataccttccccgccgtcctgcagtccagcggattgtacagcctgagtagcgtggtgaccgtcccctccagctcactgggtaccaagacctacacctgcaatgtggatcacaagccaagcaataccaaagtcgacaagcgggttgagtcaaagtacgggccaccatgcccaccctgtccagcccccgagttcctggggggaccttctgtgtttctgttccccccaaagcctaaagacactctgatgattagcagaacccccgaagtcacctgcgtggtcgtggatgtctctcaggaagatccagaggtccagtttaactggtacgttgacggcgtagaagtgcacaacgcaaaaacaaaaccccgggaggaacagtttaacagcacttatagagttgtgagtgtacttactgtgcttcaccaagattggcttaatgggaaggaatataaatgcaaagtatccaataagggactcccctctagcatagagaaaaccattagtaaagctaagggccagcctcgggaaccccaagtttacacactgccgccttctcaggaggaaatgacaaagaaccaggttagcctgacctgtctggttaagggattttatccctctgatattgccgtggaatgggagagtaacgggcagccagaaaacaattacaagaccaccccccccgttcttgattccgatggctcatttttcctgtatagcagactcaccgtggataaaagcagatggcaagagggaaatgtgtttagctgctcagtcatgcacgaagcccttcataatcattacacccagaagagcctgagcctgtctctgggcgctggcggtggtgggtccggggggggaggcagcggcggcggcggaagcgggggcggcgggtctggagctccccttaaaattcaggcctatttcaacgaaactgccgatcttccatgtcagtttgcaaatagccagaatgtcagtctgtctgagctcgtagtcgtatggcaagaccaagagaatttggtgctgaacgaagtgtacctcggcaaagagaagtttgacagtgtacatagcaaatatatggggagaacttcttttgatagcgatagctggaccctgcgactgcataaccttcagattaaggacaaggggctttaccagtgcatcattatccacaagaagcccaccgggatgatccgcatacaccagatgaacagcgaacttagcgttctg

SEQ ID NO: 1149 - DNA, 1905 bp, synthetic construct
  misc_feature 1..1905: note = LAG3 122-156-sugemalimab antibody heavy chain -CD86 IgV-Q25V/F33L/H90V polynucleotide
  source 1..1905: mol_type = other DNA
ttggacgagcgaggaaggcagagaggtgacttttcactttggctgcgacctgctagaagagccgatgccggagaatatagagcagcagtgcatctgagagatagaggaggtggaggaagtggcggtggaggctctggaggaggaggaagtggaggaggaggaagcggagaagtgcagctgttggagagtggagggggtttggtgcagcctggtggctcactgagactgtcctgtgcagcttcaggcttcacattctctagttatgcaatgtcctgggtaagacaagcacctggaaagggtttggagtgggtgtccggaatcagtggcagtggcggatttacttactacgcggacagtgtaaagggtaggtttacaatcagccgcgacaactccaagaacacactctacctgcaaatgaattccctgcgggccgaggatacagccgtatactattgcgcaaaaccacctcgaggttataattatgggccattcgactattggggccagggcaccctggtgactgtctcttccgcctccaccaaaggaccaagcgtgttcccccttgctccctgcagtaggtccactagcgagagcaccgccgccttgggttgtttggtaaaggattactttcctgagcctgtgacagtgtcttggaactccggagccctgacgtcaggggtgcatacttttcccgcagttcttcagtcatccggcctgtattccctctccagtgtggtcaccgtaccctcatcatccctgggcacaaaaacctatacatgcaatgtggaccacaaaccgagcaatacaaaagtggacaagcgggttgaatccaagtatggaccaccatgtcctccttgccctgcccctgaatttctgggcggacccagtgtgttcctcttcccccctaaaccaaaggacaccttgatgatcagccggaccccagaagtcacgtgcgtcgttgtggatgtgagccaggaggacccggaagtgcaattcaactggtacgtcgatggggttgaagttcacaatgcaaagacgaagccacgggaagagcaatttaattcaacatacagagtggtttcagttctgactgtccttcaccaagattggctgaacggcaaggagtataagtgcaaagtgtccaataaaggcctcccatccagcatcgagaaaaccatttctaaggctaagggtcagccacgggagccccaggtttatacactgcccccctcccaggaagagatgaccaagaatcaggtctctctgacttgcctcgtcaaggggttttatccatccgatatcgcagtggaatgggagagcaatggccaacccgagaacaattacaagacaactcctccagtgcttgatagtgacggatctttctttctttactctagactgaccgtggataagtcaaggtggcaggaaggaaacgttttctcttgctctgtgatgcatgaggccctgcacaatcactacacgcagaaatccctgtcactgtctcttggagcaggaggaggtggtagtggtggaggtggctctggaggaggaggttcaggaggaggcgggagtggagctccattgaagattcaggcatattttaacgagactgctgacttgccttgccagttcgcaaactctcagaacgttagtctgtccgaactggtcgtcttgtggcaggaccaggagaacctggtgctgaacgaggtgtacctgggaaaggagaaatttgacagtgtgcatagcaagtacatgggcaggacatcttttgactcagattcctggactttgaggctccacaatctgcagatcaaggacaaaggtttgtaccaatgcatcattgtgcataaaaaacctacgggaatgatacgcattcatcagatgaattctgaattgtcagtcttg

SEQ ID NO: 1150 - DNA, 1905 bp, synthetic construct
  misc_feature 1..1905: note = LAG3 122-156-sugemalimab antibody heavy chain -CD86 IgV-Q25V/F33V/H90V polynucleotide
  source 1..1905: mol_type = other DNA
ttggacgaaagaggtagacagaggggagatttctccctgtggctgcggccagccaggcgagcagatgccggcgagtacagggccgctgtgcacctgcgagaccggggcgggggagggtctggggggggaggcagtgggggaggcggttccggcgggggaggtagtggcgaagtgcagctgctcgaatcaggcggtggtttggttcagcctggcggcagcctgcgcctgtcctgcgccgcatccgggttcacctttagctcctatgcaatgagttgggtgcgccaagctccaggcaaaggtctcgaatgggtgagcggaatctctgggtcaggtggctttacttactacgcggactccgtgaaaggcaggttcacaatcagccgagataattccaagaacacactctacctgcaaatgaatagccttcgcgcagaggacactgcagtttattactgcgccaaaccacccagggggtacaactacggaccttttgattactgggggcagggaactctggttactgtgtcctctgcctccacaaaaggacccagcgtattccctttggcgccatgcagtcgcagtactagcgagagtacagccgcgttggggtgcctcgtgaaagactactttccagagcctgttaccgtgtcttggaacagtggagcgctcacttccggagtgcacaccttccccgccgtgttgcagagcagtggactctactccctcagttccgtggtgactgtacctagcagtagccttggtaccaagacctatacctgtaatgtggatcacaaaccatccaacactaaggtcgataagagggttgaatctaagtacgggccaccgtgtccgccatgccctgcccccgagttccttggcgggccatccgtcttcctctttccgccgaaacccaaggataccttgatgattagccggaccccggaagtcacctgcgtggtggtggatgtgagccaggaggaccctgaggtacagttcaattggtacgttgacggcgtcgaggtgcataacgcgaagaccaaaccacgcgaggaacaattcaactctacatatagggtggtgtcagttctcactgtgctgcatcaggactggctgaacgggaaagaatataagtgtaaggtctcaaacaagggattgccatcttcaattgagaaaaccatttctaaggccaaggggcagcctcgagagcctcaggtatacacactgccaccttctcaggaggagatgactaagaatcaggtgagtctgacttgcttggtcaaggggttttaccctagcgacattgcagtcgaatgggaatccaatggccagcctgagaacaattacaagacaacacccccagtcttggattctgatggctcctttttcctttactctcggcttaccgtggacaagagtcggtggcaggagggcaacgtcttttcttgctcagtgatgcacgaggctctccacaatcactacacacaaaagagtctgagcttgtccctgggggccggcggcggagggtccgggggcgggggttctgggggcgggggctctggtggcggggggtccggcgctcctcttaagatccaggcttactttaatgagaccgccgacctcccttgccagttcgcaaattcccagaacgtctccctttctgaactggtcgtcgtatggcaggatcaagagaacctggtgcttaatgaggtctacctgggaaaggaaaagtttgactcagtccactcaaagtacatgggacggacttcatttgactccgatagctggaccttgcgcctccacaacctgcagatcaaggataagggactgtaccaatgcataatcgtacacaagaaacccactggaatgatacgcatccaccagatgaattcagagctctccgtgctc

SEQ ID NO: 1151 - DNA, 1980 bp, synthetic construct
  misc_feature 1..1980: note = LAG3 97-156-atezolizumab antibody heavy chain -CD86 IgV-Q25I/F33L/H90I polynucleotide
  source 1..1980: mol_type = other DNA
cgaagatataccgtgctgagtgtgggacccggaggtcttagatctggtagactgcctcttcagcccagggttcagcttgacgagagaggaaggcaaagaggggattttagtctgtggctgagacctgcaaggagggctgatgccggagaatatcgagcagctgtgcatttgagagatagagggggaggtggaagtggaggcggaggaagtgggggaggtgggagtggaggaggaggtagtggagaagtacagctggtggaaagcggaggaggactggtgcaaccaggcggatcacttcggctgagctgcgcagctagcgggtttactttctccgacagctggatccattgggttagacaagccccaggtaaaggtctggagtgggtcgcatggatctccccatacggcgggtctacttattacgccgacagcgtgaagggcaggtttaccatttccgcagacacaagcaagaatacagcgtatcttcagatgaacagtttgcgggcagaagacaccgcagtgtattattgtgccagaaggcattggcctggaggatttgactactggggccagggaactctggtgactgtgagcagcgcttctacaaaaggaccgtctgtcttcccactggccccatcctctaaaagcacctctggcggcactgccgcacttggatgtttggttaaagactactttcctgagcccgtcactgtctcttggaattccggcgcgctgacatcaggagttcacacatttccggccgtcctgcagtcaagtggcctttactccttgagcagtgtggtgacggtcccatctagctctctggggacccaaacctacatctgcaacgtcaatcacaagccttctaatactaaggtagacaaaaaggtggaaccaaagtcatgtgacaagacacacacctgccctccttgtcccgctccagagcttttgggaggtccatctgtatttctgtttcctcctaagccaaaggatacactgatgattagccggactcccgaggtcacctgtgttgtggtggatgtttcccacgaagacccagaggtgaagtttaattggtatgtggacggcgtggaggtgcataatgctaaaacaaagcctagggaagaacaatacgccagcacctatagagtggtaagcgtgctgacagttctgcatcaggactggcttaatgggaaggagtacaagtgtaaggtatccaacaaggccctgcccgctccgatcgagaagacgatctccaaggctaaaggccagccacgcgaaccccaggtctatacattgccaccttcccgcgaagagatgacgaaaaatcaggtgtccctgacgtgcctggttaaggggttctacccatccgatatcgctgtcgagtgggagagcaacggacagccagagaataattacaaaactactcctccagtgctggactctgacgggtctttttttctttacagcaagcttacagtggataaaagcagatggcaacaggggaacgtgttcagttgttctgtcatgcatgaagccctccataatcattacactcagaaaagtctgtccctctcacctggagctggaggtggtggttcaggaggtggtggctcaggaggtggaggaagtgggggtggaggttctggtgccccactgaagatccaggcatatttcaatgagacagcagacttgccatgtcagttcgctaactctcaaaatatcagtctgagcgagttggttgtactgtggcaggaccaagagaacttggtgctcaacgaggtgtacctgggtaaggagaagtttgattccgtgcatagtaagtatatggggcggacgtcatttgacagtgatagctggacacttcgattgcacaacctgcagattaaggacaaagggctgtaccagtgtataatcattcacaagaagcccacagggatgatacgcatccaccagatgaacagcgagctgtctgtcctg

SEQ ID NO: 1152 - DNA, 1980 bp, synthetic construct
  misc_feature 1..1980: note = LAG3 97-156-atezolizumab antibody heavy chain -CD86 IgV polynucleotide
  source 1..1980: mol_type = other DNA
cgcagatatactgttctctcagttggacctggcggccttagaagcggtcgattgccactgcagcctagagtacagttggatgagcgcggtagacagcggggcgatttctccttgtggctgaggcctgcaagaagggccgatgctggcgaatacagagctgccgtccatctcagggataggggaggcggaggaagtggtggtggtgggtcaggcggaggaggatcaggaggtggaggatctggagaagttcagctggttgaaagtggcggaggcttggtacaaccgggtggttctcttaggttgagttgtgccgctagtgggttcacttttagcgatagctggatccactgggttaggcaggcacctggtaagggactggagtgggtagcctggattagtccctatggtggatcaacttactatgcagacagcgtgaaagggcggtttacgattagcgcagatacctccaagaacacggcctacctccagatgaattctctgcgggccgaggacacagcagtgtactattgcgcacgcaggcactggccaggaggattcgattactggggtcagggtaccctggtcaccgttagtagcgcaagcactaagggaccttccgtgtttcccctggcaccctcttcaaagtcaacaagcggaggcacggctgctttgggctgtttggtgaaagattattttcctgagcccgtcaccgttagctggaattccggagcacttacctccggagttcatacattccccgctgtgctgcagtcctctggactgtattccctgtctagcgttgtgactgtgcctagttccagcctggggactcaaacttatatatgtaacgtcaaccataagccctctaatactaaggtggacaagaaggtggagccgaagtcatgtgacaagacccacacctgtcctccttgtcctgccccagagctgcttggtggcccaagtgtcttcctgttccctcctaagcctaaagataccctcatgatttccaggacacctgaggttacctgcgtggtggtggacgtgagccatgaagaccccgaggttaaattcaactggtatgtagacggagtggaggtgcacaacgctaagactaaacccagagaagagcaatatgcgagcacatatcgggttgtgtccgtcctcactgtgctgcaccaggactggttgaacggtaaggagtataagtgtaaagtgagtaacaaggcgctccctgcccctatcgagaaaacgatctctaaggccaagggacagccacgagaaccacaggtgtatacactcccgccatctcgagaggagatgaccaagaaccaggtctccctcacctgtctggtcaagggattctatccatccgacatcgctgtcgagtgggagagcaacgggcagccagagaacaactacaagaccacaccacccgtgctcgactcagatgggagcttttttctgtactcaaagctgacagtggataagagcagatggcagcagggcaatgtgttttcctgttccgtgatgcatgaagctctgcacaaccactatactcagaagtctttgtctctttctcctggagcaggaggcggaggatctggaggtggcgggagtggtggaggtggtagtggaggaggcggttctggtgctcccctgaagatccaggcatatttcaacgagacggcagacctgccatgtcaattcgcgaactcccaaaaccagagcttgtccgaactggtggttttctggcaggatcaagagaacctcgtgttgaacgaagtgtaccttggaaaggagaagttcgacagcgtccactctaagtatatgggaagaaccagcttcgatagcgacagctggacactgcggctgcacaatctgcagatcaaagataaagggctgtaccagtgcattatccaccataaaaagccgaccgggatgataaggatccaccagatgaattccgaattgtccgtactt

SEQ ID NO: 1153 - DNA, 1980 bp, synthetic construct
  misc_feature 1..1980: note = LAG3 R97E 97-156-atezolizumab antibody heavy chain -CD86 IgV-Q25I/F33L/H90I polynucleotide
  source 1..1980: mol_type = other DNA
gaaaggtatacggtgctgtctgttggacctggaggactcagatccggaagactccctttgcagcccagagtacagctggacgaaagaggacgacaacgcggcgatttctcactctggcttcgcccagccagaagagctgacgcaggagagtatcgcgctgcagtacatttgagagacaggggaggaggaggttcaggaggcggtggaagcggaggtggtggtagtggtggaggtggctccggagaagttcagctggtcgaaagtgggggaggactcgttcaacctggaggctctttgagattgagctgcgccgcatcagggttcacatttagtgactcctggatccattgggttagacaggcgcccggaaagggacttgagtgggttgcctggatctctccttacggcggatctacatattatgccgacagcgtcaaaggcaggttcaccattagcgccgatacctccaaaaataccgcttatttgcagatgaatagcctgagagccgaggataccgccgtatactactgtgcacgcagacactggccaggagggtttgattattggggtcaggggactctggtgactgtgagttccgcaagcaccaaggggccatctgtgttcccacttgccccatctagtaaaagcaccagtggcggcactgcagctctgggatgtctcgtgaaggactattttcccgagccggtgacagtcagttggaatagcggtgccctcacatccggagtgcacactttccccgccgtcctccagagttctggactgtatagcctgtcaagcgtcgttaccgtgccatccagctccctgggaacccagacatatatctgtaatgtgaatcacaaaccgtccaacactaaagtggacaaaaaggtggagcccaagtcctgtgacaaaactcatacctgtcctccatgccctgcccctgaattgcttggtggtccttctgtctttctgtttcctccaaagcccaaggataccctgatgattagtaggacgcccgaagtgacttgcgtggtggtggacgtttctcacgaggaccccgaggtaaaattcaattggtacgtggacggggtggaggtgcacaatgccaagaccaagcctagggaagaacaatacgcctccacgtaccgggttgtcagcgtgcttaccgtgctgcaccaggattggctgaatgggaaggaatacaagtgcaaggttagcaacaaagctcttcccgcgccaattgaaaaaactataagcaaggccaagggacagccgagagagccacaggtgtacacactgcctccaagcagagaggaaatgacaaagaaccaggtgagcttgacatgtctggtgaagggattctacccgtccgatattgcagtcgagtgggagtcaaacgggcagcccgagaataactataagaccacgcccccagtactggattccgacgggtcattctttttgtactctaagctgacagtcgataagtctcgatggcaacagggcaatgtgttcagctgtagcgtgatgcacgaggctctgcacaatcactacacacagaaatcactgagtctgtcaccaggcgctggtggaggtggatctggtggtggaggatcaggaggaggtggctctggaggtggaggatcaggtgcccctctcaagatccaggcctactttaatgaaaccgcagacctcccatgtcagtttgccaactctcagaacatatcactgagcgaacttgtggttctgtggcaggaccaggaaaatctggtgctcaatgaggtctacctggggaaagagaaattcgacagtgtacattccaagtacatgggacgcacttcctttgactccgatagctggacactgaggctgcacaacctgcagatcaaagacaaagggctgtaccagtgtataattattcataaaaaaccgacaggcatgattaggatccaccagatgaactctgagcttagtgtgctt

SEQ ID NO: 1154 - DNA, 1980 bp, synthetic construct
  misc_feature 1..1980: note = LAG3 R97E 97-156-atezolizumab antibody heavy chain -CD86 IgV polynucleotide
  source 1..1980: mol_type = other DNA
gaaagatatacagtgctgtccgtcggacctggaggactccgatcagggaggctgcccctccagccgcgcgtgcaactcgatgaaaggggcaggcagcgcggcgatttttctctgtggttgagacctgccagacgggccgacgccggagaatatagggccgcggtgcatctgagggataggggcggcggaggaagtgggggcggcgggtctggaggcgggggctctggcgggggcgggagcggagaggttcagctcgtcgaatccggtggaggcctggtccaacctggtggcagtttgcgcctgtcctgtgccgcttctgggttcacctttagtgactcatggattcactgggtgagacaagccccgggtaaggggttggagtgggtagcttggattagcccctacggtggcagtacttattacgccgactccgtgaaaggccgattcacaatttccgctgatacctccaagaacacggcgtatctccagatgaattccctgcgcgccgaagatactgcagtgtactattgtgccaggcggcactggcctggagggtttgactactggggccagggaaccctggtaacggtgagttctgcctctactaaggggccgagtgttttcccactcgctccatccagtaagtctacctcaggcggaaccgccgcgttgggctgtcttgtcaaggactattttccagagccagttaccgtgagttggaattccggcgcgctcacttccggcgttcacaccttcccggccgtgctgcagagctcaggcctttattcactgagcagtgtggtgacagttccgtcatcctcattgggtacccagacatacatctgcaatgtgaatcacaaaccgtccaacacaaaggtggacaaaaaggtagaaccgaaatcctgcgataagacacatacctgtcctccatgtcccgcgcctgagctgctgggtggcccctctgtgtttctcttcccgcctaaacccaaagacaccctgatgatctcccgaacaccagaggtgacttgtgtcgtcgttgatgtgagccatgaagacccggaagtgaagttcaactggtatgtggacggtgtcgaggtccataacgccaagactaagcctcgggaagagcagtatgcaagcacatatcgagtggtcagcgtcctgactgtccttcatcaagactggctgaacggaaaagagtataaatgtaaggtgagcaataaggccctgccagcccctattgagaagaccataagcaaagctaaaggacaaccccgggagccccaggtatacactctgccaccgtcaagggaggagatgactaagaaccaggtgtcattgacatgtcttgtcaagggattctacccatcagatatcgccgtggagtgggaaagcaacggccagcctgagaataactataagactacaccgcctgtgttggactccgatggcagcttcttcctgtacagcaagttgaccgtcgacaaatcaagatggcagcagggaaatgttttttcttgctccgtgatgcacgaagctctccacaaccactatacccagaaaagtctgagcctgtccccaggggctggaggaggcggcagtggaggtggtgggagtgggggcgggggaagtgggggcgggggatcaggagcacctttgaagattcaggcatattttaacgagaccgcggacttgccttgtcagtttgccaactcccagaaccagagcctgagcgagctcgtcgtgttttggcaggatcaagaaaatctggtgttgaatgaggtttaccttgggaaggagaaattcgatagcgtgcattccaaatacatgggtcgcactagttttgatagtgatagttggaccctgaggctccacaatctgcagataaaggacaagggattgtaccagtgtattattcaccacaagaagccaactggcatgatcagaatccatcagatgaactcagagctgtctgtgctt

SEQ ID NO: 1155 - DNA, 1758 bp, synthetic construct
  misc_feature 1..1758: note = CD3B219-CD86 IgV-Q25I/F33L/H90I polynucleotide
  source 1..1758: mol_type = other DNA
gaagtgcagttggtagaatcaggtggtggtctggttcaaccaggaggatctctgagactcagctgtgcagcatccgggttcaccttcaacacatacgcaatgaattgggtgaggcaggcgccaggtaaaggcctggagtgggtagcaaggatccgcagcaaatacaataattacgcaacatactacgctgcctcagtgaagggtaggttcacgatcagtagggacgattccaagaactctctgtatctgcagatgaatagcctcaaaacagaggatacagccgtctattactgtgctagacatggaaatttcggtaactcatacgtgagctggtttgcctattggggccaagggacgttggttacagtttcaagcgcctccactaagggccctagtgtattcccccttgctccatccagcaaaagcacctcaggagggaccgcagcacttgggtgtctggtgaaggattatttccccgagcctgtcactgtgagttggaactctggagcattgacaagtggcgtgcacactttcccagcggtcttgcagtcctccgggctttacagcctgtccagcgtcgttactgttccgagctcttccctgggtacccaaacctatatctgcaacgtgaaccataagccatctaacacgaaagttgataaaaaggtcgaacctaagagttgtgataaaacccatacatgcccaccatgtcctgctccagaactgctggggggacccagtgtttttctgttccctcccaagcctaaagacacacttatgatctccaggactccagaagtgacctgcgtggtggttgatgttagccacgaagatccagaggtaaaatttaattggtatgtggacggagtggaggtgcacaacgcaaagacgaagccgcgagaggagcagtacaactctacatacagagttgtctccgtgcttaccgttctgcatcaagactggcttaacggaaaggagtataaatgcaaggtgagcaacaaagcccttcccgcacccattgagaagactataagcaaggcaaagggacagccgagggaaccacaggtgtacactctgccccctagtcgagacgagctgacgaagaatcaggtgtcactgacttgtctcgtgaaaggcttctatcccagcgatatcgcagtggagtgggagtctaatggccagcccgagaacaactacaagaccacacctcccgtactggattctgatggtagcttttttctgtatagcaaactgactgtcgataagtccaggtggcagcaagggaacgtcttctcttgcagcgttatgcacgaagctctgcataaccactatacacagaagtccctttcattgagtcctggtgctggaggaggagggtctggtggaggaggatcaggtggaggaggctctggtggaggaggaagtggcgcacctcttaaaatccaggcttactttaacgagacagccgacctcccctgccagttcgcaaactctcaaaacatcagcctgagtgagcttgtggttctgtggcaggaccaggagaacctggtcctgaacgaggtgtatttggggaaggagaaatttgattcagtgcatagcaagtacatgggacgcacctcatttgattcagacagctggaccctgagacttcataacttgcagatcaaggacaaaggcctgtatcagtgcattattatccataagaagcccaccggcatgatcagaatacatcaaatgaactccgaactgtccgtcctg

SEQ ID NO: 1156 - DNA, 1758 bp, synthetic construct
  misc_feature 1..1758: note = CD3B219-CD86 IgV polynucleotide
  source 1..1758: mol_type = other DNA
gaagtgcagttggtagaatctggaggtggattggtgcaacccggaggctccctgaggctgtcatgtgcagcatcagggttcacattcaacacctacgccatgaactgggtcagacaggcacctggaaaaggcctggaatgggtggccaggatcagatctaagtataacaattatgccacctactacgcagcttcagtcaaaggtaggtttaccatcagcagggacgattcaaaaaacagtctttacttgcagatgaactctctcaaaacggaggatactgcagtctactattgcgctcggcacggaaattttggcaacagttatgtgtcatggtttgcgtactggggacaggggacactggtgactgtgagcagcgcttctacaaagggcccatctgtctttcctctggctcccagttccaaatcaacatctggcggaacagctgctctgggatgcctcgtgaaggattactttcccgagcctgttaccgtgtcatggaacagcggggctctgacttcaggcgtgcatacgttccccgcagtcctgcagtctagcggcctgtacagcctctcttccgttgtgaccgttccaagctccagcctcggtacgcaaacatatatttgtaatgtcaatcacaaaccaagtaatacaaaagtcgataagaaggtggaaccaaagtcctgcgataaaacccacacttgccctccctgtcctgctcccgaacttctgggtggcccaagcgtgtttctttttcctccaaagccaaaggacaccctgatgatttcacggacacctgaggtcacgtgcgtggtggttgacgtctcacatgaggacccggaagtcaagttcaattggtacgtggacggcgtggaagtccacaacgcgaagacaaagcccagggaagagcaatataactccacttatcgggtggtttctgtgttgacagtgctgcaccaagattggctgaacggcaaagaatataaatgtaaggtgtccaacaaagctctgcctgctccaatcgagaagaccatatctaaagctaaagggcagcctagagagccccaggtttatactctgcctccctcacgggatgaattgacaaagaaccaggttagccttacctgcctggtcaagggcttctatccctccgacatagcagttgagtgggagtccaacggccagcccgaaaacaactacaaaactacacccccagtgctggacagtgatggctcattcttcctgtactccaaactcaccgtggataagagtcgatggcaacagggtaacgttttttcctgcagtgtgatgcatgaggccctgcacaatcactacactcagaaatctttgagtcttagtccaggagctggaggaggaggtagcggaggtggtggatctggtggaggaggaagcggtggtggcggatctggagctcctcttaagattcaggcatatttcaacgagaccgcagatcttccttgccagtttgccaactcccagaatcaatctctttctgaactcgtagtgttttggcaggaccaggaaaatctcgtcctcaacgaagtgtatttgggcaaagagaaatttgattctgtgcacagcaaatacatgggcaggacctcctttgactctgacagctggaccctgcggctccacaacctgcaaataaaggataagggcttgtaccagtgtatcatccatcataagaagcccacaggcatgatacgcattcaccagatgaacagtgagcttagcgtcctg

SEQ ID NO: 1157 - DNA, 1344 bp, synthetic construct
  misc_feature 1..1344: note = sugemalimab antibody heavy chain polynucleotide
  source 1..1344: mol_type = other DNA
gaagtgcagcttttggaatcaggaggtggcttggttcagcctggaggatcactgcgcctgtcttgtgctgccagcggctttactttttctagttacgctatgtcttgggtgagacaggccccaggtaagggcttggagtgggtgtctgggattagtggttccggaggattcacttattatgctgactccgtgaagggaagattcacaatctcccgagacaactccaagaataccctttatttgcagatgaactctctgcgcgcagaggataccgctgtatactactgcgcaaagcctcctaggggctataactatggaccttttgactattggggccagggtacccttgtgactgtttcttccgcttccactaagggaccatctgtctttcccttggccccctgtagtcgatccacttctgagtcaactgcggctcttggctgcttggtcaaggattattttcctgagcctgttactgtgtcatggaacagtggagccctcaccagtggggtgcatacctttccagccgtgctgcagtcctccggattgtacagcctgagttcagtagtcacagtgccctcaagcagcctgggcacaaagacctatacatgcaatgtggatcataagcccagtaacacaaaggttgataagagagtcgagagcaagtatggaccaccatgtcccccttgtccagctcctgaatttcttgggggacccagcgtgttcctgtttccccctaagcctaaggatacactcatgatctccagaacccccgaggtgacttgtgtagtagttgacgtgtctcaggaggacccggaggtgcaatttaattggtatgtggacggagtggaagtgcacaacgctaagacaaaacctagggaggaacagttcaactcaacctatcgggttgtctccgtgctcacagtgttgcaccaagattggttgaatggaaaagaatacaaatgcaaagtaagcaataaagggctgccaagttctatcgaaaaaacaatttcaaaagcaaaggggcagccccgagagccacaagtgtacacgctgcctccatctcaggaggaaatgacgaaaaatcaggtcagtcttacttgcctggtgaaggggttctatccctccgacatagcagtggaatgggaaagcaacggacagcccgagaacaattataaaaccaccccaccagtgctggacagcgatggttcatttttcctttatagcaggctgaccgtcgataaaagccggtggcaggagggaaatgtgttctcatgctcagtgatgcatgaggcgcttcacaaccactatactcagaagagtctgagcttgtcacttggaaag

SEQ ID NO: 1158 - DNA, 642 bp, synthetic construct
  misc_feature 1..642: note = sugemalimab antibody light chain polynucleotide
  source 1..642: mol_type = other DNA
tcatatgtccttactcaacccccatccgtatctgtggccccaggacaaaccgcccgaattacgtgtggagggaacaacattggcagcaaaagcgtgcattggtaccagcagaaacctggccaggcccctgtgcttgttgtatatgatgactctgatcgcccttctggcatccctgagagattttccgggtccaacagtggaaacacagcaacgctcactatttccagggttgaagccggcgatgaagccgattattattgtcaggtgtgggacagcagcagcgatcacgtcgtttttggtggggggaccaagctgactgtgttgggccaaccaaaggccgctcccagcgtaaccctcttcccaccatccagcgaagagctgcaggcaaacaaggccacactcgtgtgcctgatcagcgacttctacccaggagccgttacagtggcttggaaggccgacagtagccctgtgaaggccggtgtggagactactacaccatcaaagcaaagcaacaacaaatacgcagcttccagctatctgtccctgacccccgagcagtggaaaagccaccggtcttacagctgccaggtgacgcacgagggatccaccgtggagaaaacagtggcaccgacagagtgcagc

SEQ ID NO: 1159 - DNA, 1344 bp, synthetic construct
  misc_feature 1..1344: note = atezolizumab antibody heavy chain polynucleotide
  source 1..1344: mol_type = other DNA
gaagtgcagttggtagaaagtggagggggattggttcaaccagggggaagtctgcgactgagttgtgccgccagcggttttacgttttccgattcctggattcattgggtccgacaagctccaggaaaggggctcgagtgggtggcttggatcagcccttatggcggctccacatactacgctgactcagtcaagggccggttcaccatcagcgccgatacctccaagaatactgcctacctccagatgaatagtctgagggccgaggacaccgccgtttactactgtgctaggcgacattggccagggggctttgactattggggccaaggaactctggtaactgttagctccgccagcaccaaagggccgagcgttttccccttggcaccaagctccaagtcaacctcaggaggcaccgctgcccttgggtgtcttgtaaaggactactttccagaacccgtgacagttagctggaactctggagccttgacttccggagtgcataccttccctgccgtgcttcagtctagtgggctgtactccctgtctagcgttgtcactgtgcccagcagcagcctgggcacacagacatatatctgtaacgtcaatcacaaaccgagtaacacaaaggtggacaaaaaagttgaacccaagtcctgtgacaagactcatacctgtcccccatgccctgctccagaactgctgggaggcccatccgtctttctgtttccaccgaagcctaaagataccctgatgataagccggactcctgaagtgacatgcgtggtcgtggatgtgtcccatgaggacccagaagtgaagttcaactggtacgtggatggtgtcgaggtgcataatgccaaaactaagcctcgagaggaacagtatgcctccacatacagggtggtctccgtccttactgtgcttcaccaagactggctcaacggcaaagagtataaatgtaaggtaagcaacaaggcattgcccgccccaatcgagaaaaccatcagcaaagctaaggggcaacccagagagccacaggtgtacactctccccccaagcagggaggaaatgaccaagaatcaggtatcactgacctgcctcgtcaaaggcttttacccctcagacattgcagtggaatgggaatcaaacggacagcccgagaacaattataagacaacccctcccgttctggactccgacggatcattctttctgtattctaagctgaccgtggataagagcagatggcagcaggggaacgtgttctcttgtagtgtgatgcatgaggcgctgcataatcattatacgcaaaaaagcttgtctctctctccaggtaag

SEQ ID NO: 1160 - DNA, 642 bp, synthetic construct
  misc_feature 1..642: note = atezolizumab antibody light chain polynucleotide
  source 1..642: mol_type = other DNA
gatatccaaatgacacagtccccaagttctctgtccgcttccgtgggtgaccgggtaacgatcacctgccgggcgagccaggacgtgtccacagccgtggcatggtatcagcaaaaaccaggcaaagccccaaaactcttgatctactctgcctctttcttgtatagcggggtgccatcacggttttctggctccggtagcggcactgacttcactttgactattagcagcctccagcccgaggatttcgctacatactattgtcagcagtacctgtaccatcctgcgacattcggccaggggaccaaagtggaaatcaaaaggacagtggccgctccttcagtcttcattttcccgccatccgatgagcagttgaaaagcgggaccgccagtgtcgtctgtcttttgaacaacttctacccaagggaggccaaggtgcagtggaaggtggataatgccctccagtctggaaattcacaggaaagtgtgaccgagcaggactctaaagattccacatacagcttgtcaagcactctgacactcagcaaggctgattatgaaaaacataaagtttacgcttgcgaggtgacacaccagggtctgtcttccccagtgacgaaatcattcaaccgaggcgagtgt

SEQ ID NO: 1161 - DNA, 1365 bp, synthetic construct
  misc_feature 1..1365: note = CD3B219 antibody heavy chain polynucleotide
  source 1..1365: mol_type = other DNA
gaagttcaacttgttgaatcagggggaggactggtacagccaggtggctcattgagactcagctgcgctgcgagcggcttcacctttaatacctatgctatgaattgggtcagacaagccccaggcaagggattggagtgggttgcaagaattcgatctaagtataataattacgctacatattacgctgccagtgtgaaggggaggtttacgatctcccgggacgactccaagaactctctgtatttgcaaatgaattctctgaagaccgaagacacagcagtgtactactgtgcccgccacggtaatttcggcaatagctacgtgtcctggtttgcctattggggccaagggacactcgtgaccgttagttccgcctctacaaaggggccctctgtcttcccattggctccctcatccaagtccacgtcaggaggtaccgcagcactgggttgcctcgttaaggactacttccccgaaccagtgaccgtaagctggaacagcggagctctcacctccggagttcatactttccctgctgtcctgcaatctagcggcttgtactcactttcctctgtagtcaccgtccctagctccagcttgggcacgcagacctatatttgcaatgtgaatcataaacctagtaacacaaaggtggacaagaaggtggagcccaaatcctgcgacaagacccatacatgtcccccttgtccagcacctgaactgttgggaggtccatccgttttccttttcccaccaaagcccaaggataccttgatgatctctagaacgcctgaagtgacttgcgtagtggttgatgtctcccatgaggaccccgaagtgaagtttaactggtatgtcgatggggtcgaggtgcacaatgccaaaactaagcctcgcgaggaacagtacaactctacctaccgggttgtgtccgtgttgaccgttctgcatcaggactggctgaatgggaaggaatacaaatgcaaggtctctaataaggccctgcctgcaccaattgagaaaacaatctctaaagctaagggccaacccagggaacctcaggtttacacactgccaccttccagagacgagctgacgaagaaccaggtctccctgacctgcctggtcaaaggcttttacccaagcgatatcgcggtggagtgggagtctaacggtcagcccgagaataactacaagaccacccctcctgttctcgacagcgatggcagtttcttcctgtattccaaactgaccgttgacaaaagtcggtggcagcagggtaatgtgttttcctgcagtgtgatgcacgaggctctgcataaccactacacccagaagtcacttagcttgagccctggcaaa

SEQ ID NO: 1162 - DNA, 645 bp, synthetic construct
  misc_feature 1..645: note = CD3B219 antibody light chain polynucleotide
  source 1..645: mol_type = other DNA
cagaccgtggttactcaggagccatcattgacagtatcaccaggcggcactgtgactcttacatgtcggtcatccacaggagccgtgaccactagcaactacgctaactgggtgcagcagaagccaggtcaggctcccaggggcctgattggcggtaccaataaaagagctcccggaacccccgcccgattctcaggtagcctgctgggaggtaaagcagcactcaccctgagcggagtacaacctgaagatgaggccgagtactattgcgcactttggtattctaacttgtgggtgttcggtggtgggacaaaactcacagttctgggacagcccaaggcggccccaagcgtcaccctgtttcctcctagcagcgaggaactgcaggctaacaaagcaaccttggtttgcctgatctcagacttttatccgggggctgtcaccgtggcctggaaggccgactcttctcctgtcaaggctggcgtcgagaccacgactcccagcaaacaaagcaataacaaatatgccgcttcatcatacctgtcactcacgcccgagcagtggaaatcacaccgcagctacagttgtcaggtgacccacgagggcagcaccgtggaaaagacagtagcccctaccgaatgcagc

SEQ ID NO: 1163 - DNA, 1980 bp, synthetic construct
  misc_feature 1..1980: note = LAG3 97-156-sugemalimab antibody heavy chain -CD86 IgV-Q25I/F33L/H90I polynucleotide
  source 1..1980: mol_type = other DNA
agacgatacaccgtgctttcagtgggaccaggaggattgagatccggcagactgccactgcagccccgggtgcagttggatgaaaggggaagacagcggggggatttcagcctttggcttagacctgctagaagggccgacgccggagagtatagggcagcagtgcacctgagagatagaggaggaggtgggtcaggtgggggaggtagcggtggaggaggttcaggagggggaggatcaggagaggtgcagttgctcgaaagtggaggtggccttgtgcaaccaggaggaagcctcaggcttagctgcgccgcatcaggtttcaccttctcaagctatgccatgagctgggtcagacaggcacctggcaaagggctcgagtgggtctcagggatctcaggatccggtgggttcacctattatgctgatagtgtcaagggacggtttactatctcacgagataactccaaaaatacattgtatctgcagatgaatagtctcagagctgaggacaccgccgtctactattgcgctaagccgccacgggggtataactatggtcctttcgattattggggccaggggacccttgttactgtcagctcagcatccacaaaaggcccctctgtctttcctctggcgccatgctcccggtctactagtgagtcaactgccgccctgggatgcctggtgaaggactactttcccgagcctgtcaccgttagctggaactcaggagctttgacatccggcgtgcatactttccctgccgtgctgcagtcctccggactctacagtctcagctcagtcgtgactgtgccctcttcaagtttgggcacaaagacctacacttgcaacgtcgatcataaaccatccaatacaaaggtagataaaagggtggaatctaagtatggacccccttgtcctccatgtcccgcacctgagttccttggagggccatcagtctttttgtttcctccaaagcctaaagatacactcatgatatcccgcacacctgaagtcacctgtgtggtggtggatgtgagccaggaagatcctgaggtccagtttaattggtacgtagacggggttgaggtacacaatgctaagaccaaacctcgggaggagcagtttaattcaacctatcgcgtcgtttcagtcctgactgtgcttcatcaggactggctgaacgggaaggagtataagtgcaaggtgtctaacaaggggctcccttcctctatcgaaaagacaatctctaaggctaaagggcaaccccgggaaccacaagtctacactctgcctccaagccaggaggagatgactaaaaatcaggtttcattgacttgccttgtaaaggggttctaccctagcgatatcgcagttgaatgggagtcaaatggccagcctgaaaataactacaaaacaacaccacctgtcctggactccgacggctctttctttctgtactctaggctgactgttgataagagccggtggcaggaaggcaacgtcttcagctgttcagtgatgcatgaggccctgcacaatcactatacccagaagtcacttagtctttcattgggagctggagggggaggttcaggaggcggtggatctggaggaggaggatccggaggtggaggaagtggagctcccctcaaaatccaggcctacttcaatgaaaccgccgaccttccgtgtcagttcgccaacagccagaacatatctctgtctgagctggttgtcttgtggcaggatcaagaaaatctggtgctgaatgaggtctacttgggaaaggagaagttcgatagcgtccactcaaaatatatgggacgaaccagctttgatagtgattcctggaccttgagactccacaatttgcaaatcaaagataaagggctgtaccagtgtatcatcattcacaagaaacctaccggaatgataaggatccaccagatgaattctgagctgtccgttctg

SEQ ID NO: 1164 - DNA, 1980 bp, synthetic construct
  misc_feature 1..1980: note = LAG3 97-156-sugemalimab antibody heavy chain -CD86 IgV-Q25V/F33L/H90I polynucleotide
  source 1..1980: mol_type = other DNA
agaagatacactgtgttgtctgtcggaccgggaggactgagaagcggcaggctgcccttgcagcctcgggtgcaacttgacgaacgcggacgccaacgcggagacttctcactttggttgagacccgcccggagagccgacgccggcgagtaccgcgcagcagtgcacctgagagacagggggggagggggctccggcggcggagggtccggcggtggggggagcggcgggggtggatccggcgaagtccagttgctggaaagcggaggggggctggtgcagccgggcggatcactgaggctcagctgcgccgcaagcgggttcacgttttcaagttacgccatgtcttgggtgcgccaggctccaggcaaggggctggaatgggtcagtggaatctccggctccggcgggtttacctattacgcagactctgtgaagggacgcttcacaatctcaagggataacagcaagaacaccctttacctgcagatgaattctctgcgcgccgaggacacggctgtctattattgtgccaaaccacccaggggatataattacggacccttcgactactgggggcagggtactctggttaccgtttcctcagcttcaactaagggccccagtgtctttcccctggcgccctgtagtaggtcaacctccgaaagcaccgccgctctgggctgtttggttaaggattactttcctgaacctgtcactgtctcttggaactcaggcgccctgaccagtggggtccacactttccctgcggttctgcaatcatctgggttgtactctctcagcagtgtggtcacagtgccctcctcaagcctgggtaccaagacttatacatgtaacgttgaccataaaccctccaacaccaaggtagacaagcgagtggagagcaaatatggccccccttgccctccgtgcccggctccagagttcctcggcggcccttctgtattcctgttcccgcccaaacccaaggatactctgatgattagtaggacaccggaggtgacttgcgttgttgtggatgtgtcacaagaagatcctgaagtgcagttcaattggtatgttgacggcgtggaggttcacaatgccaagaccaaacctagggaagagcaatttaactccacctaccgagtagtaagcgtgctgacagtgctgcaccaggattggctcaacgggaaggagtacaaatgcaaggtgtccaacaagggcttgcctagctccatcgagaagacgatttcaaaggctaaagggcagccgagggagccccaggtttacacgttgccaccttctcaggaggaaatgaccaaaaatcaggtgtctctcacatgcctcgttaaaggcttctacccgtcagatatcgctgtcgagtgggaaagcaacggtcagcccgagaacaactataagaccaccccacctgtgctggattcagatggtagctttttcctttattccaggctcactgtggacaaaagccggtggcaggaaggaaatgttttttcttgctctgtgatgcacgaggcgctgcataaccactatacacagaaatcattgtcactttctttgggtgcgggaggagggggctcaggtggcggaggatctggcggtggcggaagcgggggcggaggctctggcgccccgctgaagattcaagcttacttcaacgaaacggccgatctgccttgccaattcgccaattctcagaatgtgtctctgtctgagctggtagttctgtggcaggaccaggagaaccttgttctcaacgaggtgtatcttggaaaagaaaaatttgattccgtgcattccaaatacatggggagaactagcttcgatagtgattcatggaccctgagactgcacaatctgcagattaaggacaaggggctgtatcagtgcatcattatccataagaaacccacaggaatgatccggatccaccaaatgaatagcgaactgtctgtactg

SEQ ID NO: 1165 - DNA, 1980 bp, synthetic construct
  misc_feature 1..1980: note = LAG3 97-156-sugemalimab antibody heavy chain -CD86 IgV-Q25I/F33V/H90I polynucleotide
  source 1..1980: mol_type = other DNA
agaagatacaccgtcttgtcagtcggacccggtggtctgagatctggaagactgcccttgcaaccacgcgttcaactggatgagagaggcaggcaacggggggacttttctctgtggctcagacctgctcgaagagccgatgcaggtgagtatagagccgccgtacacctgagagatcggggtggaggtggaagtggaggaggaggaagcggaggtggaggttcaggaggaggtgggtctggcgaggtgcaactcctggagtctgggggaggacttgttcagccaggaggatccttgagactgtcttgtgccgcctcaggctttaccttcagttcctacgctatgagctgggtaagacaggcacctggcaagggcctcgaatgggtgagcggaatttccgggagtggcggtttcacatactatgcagacagcgtgaaaggacgattcacaatctcaagagacaactcaaagaacaccctgtaccttcaaatgaattctctccgagccgaggataccgctgtgtactactgtgccaaacctccacggggctacaactacgggcccttcgattactggggacagggcacgcttgtaacagtcagttctgcttcaacaaagggacctagtgtttttcctctcgctccttgcagcagatccacctccgagtctaccgccgccttgggttgtctcgtcaaggactactttccagaaccagttaccgtgtcttggaactcaggggccctcacttctggggtccacacgtttcctgctgttctgcagtcctcaggactgtattcccttagctccgtcgtcacagtgcctagctccagcctgggcaccaaaacctacacctgcaatgtggatcataagccctctaataccaaggtggataaaagggttgagtctaagtacggtcctccctgtccaccttgtccagcacctgaattcctcgggggcccaagtgtgttcttgtttccccccaaaccaaaagacacactgatgatcagtagaacaccggaagtgacctgtgtggtggtcgatgtgtctcaagaagatccggaagttcagttcaactggtatgttgatggggtggaggtgcacaatgctaaaaccaagcccagagaagaacagttcaattctacatatcgcgtcgtttctgtgctgactgtccttcaccaggactggctgaacggcaaggagtataagtgcaaggttagcaacaaagggctcccttccagcatcgaaaagaccataagtaaagccaagggtcagccaagggagccacaggtgtacaccctgccgccttctcaggaggagatgactaaaaatcaagtctccctgacttgcctggtgaaaggcttttatccgtcagatatcgctgttgaatgggagtccaacgggcagccggagaacaactacaagaccactcccccagttttggattccgatggttcattctttctctattccagacttacagtggacaaaagccgctggcaggagggcaacgttttctcatgcagcgtgatgcacgaggccttgcataaccactacactcagaaaagcctgtctcttagcttgggtgcaggaggagggggttctggaggtggaggatcagggggagggggttcaggaggaggaggatctggagcccctctcaagatccaggcttactttaatgagactgctgacctgccatgccagttcgccaatagccagaacatttccctgtcagaactggtggtcgtgtggcaggaccaggagaacctggtgctgaacgaggtttatctggggaaggagaaattcgattccgtccactcaaaatacatgggccggacatcattcgacagcgattcctggacgctgcgcctgcataatctgcaaattaaggacaaggggctttaccagtgcatcatcatccataaaaaacccactggtatgattcgcattcatcagatgaattcagagctcagtgtgctg

SEQ ID NO: 1166 - DNA, 1980 bp, synthetic construct
  misc_feature 1..1980: note = LAG3 97-156-sugemalimab antibody heavy chain -CD86 IgV-Q25V/F33V/H90I polynucleotide
  source 1..1980: mol_type = other DNA
cgaagatacacagttctctctgtgggtcccggtggtcttagatccgggagactgcctcttcagccacgagtacagctcgatgaaaggggcaggcagagaggagacttcagtctctggttgcgacctgcacgacgcgcagatgctggtgaatacagggccgccgttcatctgagggatcgaggtggaggaggttctggaggaggtggatctggtggaggaggttctggaggtggtggtagcggagaggtgcagctgctggaatcaggaggtggactggttcagccgggtggatccctgagactgagctgtgcagcctccggtttcaccttctcatcttacgccatgtcttgggtgaggcaagcccctggaaaaggactcgaatgggtctctgggatctctggaagcggtgggtttacatattacgctgacagcgttaaagggcggttcactatctcccgagataattcaaagaatacgttgtacctgcagatgaactctctgagggccgaggataccgccgtctactactgcgccaagccaccaaggggatataactacgggcctttcgattactggggtcaggggactcttgttaccgtcagcagtgccagcaccaaaggaccaagtgtattccctttggctccctgctcacggagcacaagcgaatccacagcagcattgggatgcttggtgaaggactacttccctgagcccgttacagtgtcttggaacagcggcgctcttaccagcggggtacataccttccctgccgttctccagagttcagggctctactccctgagctccgtggttactgtgcccagcagttcactcggtacgaaaacatacacctgcaacgtcgaccacaaaccttccaacaccaaggtggataagcgagtggagtcaaagtacggacctccctgtcctccatgtccagccccagagttccttggcggacctagcgtgttcctgtttccccctaagcctaaggatacactgatgatcagccggaccccagaagtcacatgtgtggtcgtggacgttagtcaggaggatcccgaagttcagttcaattggtatgtggacggagtcgaggtccacaatgccaaaacaaagccacgggaagagcagttcaactccacttaccgcgtcgtgtctgtcctgacagtgttgcaccaagattggctgaacggtaaggaatacaaatgcaaggtatccaataaagggctgccctcctcaatcgaaaagaccatctctaaggctaaaggacagcctcgcgaaccccaggtttatacactccccccgtcccaagaagagatgaccaaaaaccaggtgtcactgacttgtttggtgaagggcttttaccctagcgatatcgccgtggagtgggaaagtaacggccagccggaaaataattacaagacaacccctccagtgctggattctgatgggtctttttttctgtacagcaggctgacagtcgacaagtcaagatggcaggaaggtaacgtgttctcttgcagcgttatgcatgaagccttgcacaatcactacacgcagaagagcctttccctttccctcggagctggaggaggaggtagtggaggaggaggcagtggaggaggcggatctggtggtggaggttccggagcaccactgaagattcaggcatacttcaacgagaccgctgatcttccttgtcaatttgcaaactcacagaatgtcagtttgtccgagctggttgtggtctggcaggaccaagagaaccttgtgctgaatgaagtgtatctgggaaaagagaagtttgactccgttcacagcaagtacatgggaaggacatctttcgattccgattcctggacactgcggctgcacaatcttcagatcaaagacaaaggcttgtatcagtgtatcattatccataagaagccaaccggcatgatcagaatccatcagatgaactctgagctgtccgtgctc

SEQ ID NO: 1167 - DNA, 1980 bp, synthetic construct
  misc_feature 1..1980: note = LAG3 97-156-sugemalimab antibody heavy chain -CD86 IgV-Q25I/F33L/H90V polynucleotide
  source 1..1980: mol_type = other DNA
agaagatatactgtcctgagcgttgggcccggtgggttgagatcaggtagactcccacttcaacctcgggttcagttggacgagaggggcagacagaggggagatttttcactctggcttcgaccagccagaagagctgatgctggcgaatatagggccgcagttcatttgagagacagaggtggaggaggttcaggtggaggagggtcaggtggtggaggttcaggtggtggtggatccggtgaagtccagctgctcgagtctggcggtggccttgtacagcccggaggatctttgaggctgtcttgcgccgcgagcggctttacttttagcagctacgctatgtcctgggtccgacaggctcctgggaaaggcctggagtgggtgtctggcatttctggcagcggagggttcacttattacgccgattcagtgaaaggcagatttactatctccagagataattccaaaaacaccctgtatctgcagatgaactctctgcgagccgaggatacagctgtgtattattgtgctaaacctccccgagggtataactatggaccttttgattactgggggcagggaactcttgttacagtctcttccgctagcactaaaggtcctagtgtctttcccttggctccttgttctcggagcacatctgaaagcacggcagctttggggtgcctggtgaaggactactttccagagccggtgacggtgagctggaattctggcgcactcacaagtggtgtgcatacattcccagctgtgctgcagagctccggtctctatagcctgagctcagtcgtgactgtgcccagctcttctctggggactaagacatatacatgtaatgtggaccacaaacccagcaataccaaagtggacaagagggtggaatccaaatacggtccaccatgtcctccatgtcccgctccagaattcctcgggggcccatctgtctttctgtttccccctaagcccaaggacaccctgatgatttcacgcacacctgaagtcacatgtgtggttgtggacgtctcccaggaggacccagaggtgcagttcaattggtacgtcgacggcgttgaggtccataatgccaaaacaaaacctcgggaagaacaatttaatagcacctacagagtggtctccgtgctgacggtgttgcaccaagattggctgaatggtaaggaatataagtgcaaggtttccaacaaggggctcccctcctccatcgagaaaaccatcagcaaggccaaaggccagccaagagaacctcaagtctataccttgccaccctcccaggaggagatgacaaaaaaccaggtttccctgacttgtctggtgaagggcttttacccctcagatatcgctgtggagtgggagtctaacggtcagccagagaataattacaaaactacaccgcccgtcctggacagcgatggaagttttttcctgtactctcggctgacagtggataaatcccgctggcaggagggtaatgttttcagttgcagcgtgatgcatgaggcattgcacaaccactatacacagaagagtttgtctctgtcacttggtgcaggaggaggaggttctggcggaggtggatccggaggaggaggatctggaggaggtggaagtggtgcccccctgaagattcaggcctactttaacgaaactgctgacctgccgtgccagtttgccaactctcagaatatcagcctgtcagaattggtggtgctctggcaggaccaggagaatctggtgctgaatgaggtgtacctcgggaaagaaaaattcgatagcgtccacagtaagtacatggggcgaactagcttcgactccgactcatggaccctgaggctgcataacctccagatcaaagacaagggtctgtatcagtgtatcatcgtccacaagaagccgactggcatgatcagaatccaccagatgaacagcgagctgtctgtactt

SEQ ID NO: 1168 - DNA, 1980 bp, synthetic construct
  misc_feature 1..1980: note = LAG3 97-156-sugemalimab antibody heavy chain -CD86 IgV-Q25V/F33L/H90V polynucleotide
  source 1..1980: mol_type = other DNA
agaaggtacacagtgctttccgttggacccggaggacttaggtctggaagattgcctctccagcccagagtgcagctggacgaacgaggaagacagaggggcgactttagtctgtggctgagacctgcccgcagagccgatgctggtgaatatagagccgcagttcacctgagagatagaggaggaggaggatctggaggaggaggatctgggggtggagggtcaggaggtggtggatcaggagaggtgcaactgctggaaagtggcggcggtttggtacaacctgggggttcattgcggctgtcttgcgcagcttcaggatttacattctctagttatgccatgtcatgggtcaggcaagccccaggtaagggactggagtgggtgagcggtatcagtggcagcggtgggtttacctactatgccgattctgtcaagggacgcttcacaatctcccgcgacaactccaagaataccctttacctgcagatgaactcactgagagccgaggataccgctgtgtattactgcgccaaacccccaagagggtacaactacggtccttttgattattggggccagggcacattggtgaccgtctcctctgcctctactaagggcccatctgtttttcccttggccccttgcagcagaagcacttctgaaagcacagcagccctcggatgcctggtgaaggactattttcctgagcctgtgactgtgtcctggaacagtggggctctgacctctggagtccatacatttccagctgtactgcaaagctcaggactctactccctttccagcgtagttacagtgcctagttcatccctcggcaccaaaacctatacttgcaacgtggaccacaagccgagcaacaccaaggtggacaagagggtggagtctaagtacggtcctccatgccctccgtgtccagctccagaatttctgggcggaccatccgttttcctgtttccacccaagccaaaagacactctgatgatcagtcggacgcccgaggtcacttgcgtcgtcgtagatgtcagccaggaggaccccgaggtgcagttcaattggtacgtggatggcgtcgaggtgcataatgctaaaactaaaccccgcgaggaacaatttaattctacctaccgcgtcgtttccgtccttacagttctgcatcaggactggcttaatggtaaggaatacaagtgcaaggtatctaacaagggcctgccctcaagcatcgagaagaccattagcaaagccaagggtcagcccagagagccacaggtctacacccttccaccatctcaagaggagatgacaaaaaaccaggtctccctgacttgtctcgtgaagggtttctatccctccgacatcgccgtcgaatgggaatcaaatgggcagcccgaaaataactataagaccacccctccggtattggatagcgacgggagctttttcctgtatagcaggctgaccgtcgataaaagcaggtggcaggagggcaacgtctttagctgtagtgtcatgcacgaggctcttcacaaccattatacccaaaagagccttagtctgtcattgggagctggaggaggaggatctggaggaggaggatcaggaggtggtggctcaggaggtgggggatcaggtgctcctcttaagattcaggcgtattttaacgagacagcggatcttccctgccagttcgccaattcccagaatgtctccttgtccgagcttgtggtgctgtggcaggaccaggagaaccttgtgttgaatgaggtctacctgggaaaggagaagttcgatagcgtgcatagcaagtacatgggtcggacctcatttgattcagactcttggactttgcgcctgcataacctgcaaattaaagataagggcctttatcagtgcatcatcgtgcataaaaagcccaccgggatgatccggattcaccagatgaactccgaactgtcagtgctt

SEQ ID NO: 1169 - DNA, 1980 bp, synthetic construct
  misc_feature 1..1980: note = LAG3 97-156-sugemalimab antibody heavy chain -CD86 IgV-Q25I/F33V/H90V polynucleotide
  source 1..1980: mol_type = other DNA
agacgctatactgtgttgagcgttggaccagggggactgagatcagggcggcttccactgcagccacgagttcagctggatgaaagggggagacagaggggcgatttcagtctctggctgagaccagcgaggagagccgacgcaggtgaatatcgagcagccgtgcatctgagagatagaggtgggggaggaagtggtggcggaggatcaggtggtgggggaagtggaggaggtggatctggagaagtacagcttctggaaagtggtggaggactggtgcaaccgggtggaagtctcagactcagctgcgctgcaagcgggttcacatttagttcatacgcaatgtcttgggtcagacaggccccaggcaagggcttggaatgggttagcggcatctccggttcaggcggatttacttactacgccgattctgtcaagggccggtttactatatctcgcgacaactctaagaataccctttatctccagatgaattccctgcgggccgaggatactgccgtctactactgtgcaaaaccaccgagaggatataattatggaccattcgactattgggggcaggggacacttgttaccgtgagcagcgctagcaccaagggtccctctgtttttcctcttgcaccatgctccagaagcacttctgaatctactgcagccctcggctgtctggttaaagattacttcccggagcctgtgaccgttagctggaattctggtgctctcaccagcggcgtgcacacctttcccgctgtactgcaaagctccggactgtacagcctgagctccgtggtcactgtaccaagctcatctctgggaactaaaacatacacatgcaatgtggaccataaaccttccaacacaaaagtggataagagggtggagtctaaatatggaccaccttgtcctccatgtccagcccctgagttcctgggcggtccttctgttttcttgtttccccccaagcccaaagatacccttatgatctccagaacacccgaggtgacatgtgtggttgtggacgtctctcaggaggaccctgaggtgcagtttaattggtacgtggacggcgtggaggtgcacaacgctaagacgaagccaagagaggagcagttcaactcaacctatagagtggtatcagtcctgaccgtgctgcaccaggattggctgaatggcaaagagtacaagtgcaaagtgtctaataaggggctcccttcatcaattgagaaaactatctccaaggccaagggacagcccagagagccacaggtgtataccctgcctccctcccaggaggagatgactaaaaaccaggtgtctctgacgtgtctggtgaaaggattctacccgagcgacatcgcggtggagtgggaatcaaacggccagcccgagaataactataaaactacacctcctgtgctggactcagacggctcctttttcctctactctcgactgacggtcgataaaagtcgctggcaggaaggcaacgtattctcatgctctgttatgcatgaagctctgcacaaccactatacgcaaaagagtctgagcctgagccttggagctggtggaggaggatcaggaggcggaggaagcggaggaggtggatcaggaggaggtggatccggcgctccactgaagatccaggcttacttcaatgaaacggccgatctgccatgtcagttcgcaaatagccagaatattagcctgtctgaattggtcgtagtgtggcaggatcaggaaaacctggttctgaatgaggtgtatctgggaaaggagaaattcgattctgtgcattctaagtatatgggccgcacgtcctttgacagcgactcctggactttgaggttgcacaacctccagataaaagataaaggcttgtaccagtgcatcatagtacacaagaagcctacagggatgattcgaatccaccagatgaactcagagctgagtgtgctc

SEQ ID NO: 1170 - DNA, 1980 bp, synthetic construct
  misc_feature 1..1980: note = LAG3 97-156-sugemalimab antibody heavy chain -CD86 IgV-Q25V/F33V/H90V polynucleotide
  source 1..1980: mol_type = other DNA
agaagatacacagttttgtcagttggacctggcggcttgagaagtggtcgcctgcctttgcaacctcgggttcagctggatgagcggggtagacagcgaggcgacttctcactgtggctcaggccggcaagaagggcagatgcaggtgagtacagagctgccgttcacctgagagatagaggaggaggaggttcaggagggggagggtcaggaggtggaggtagtggaggaggcggcagtggtgaggtccaactgctggaaagcggtggcggactggtgcaacctggaggatcactgcggctttcctgtgcagcctctgggtttacattctccagttacgcaatgtcctgggtacggcaggctccaggaaagggactcgaatgggtcagcgggatttctgggtctggcgggtttacctactatgcagattcagtcaagggccggtttaccatcagccgggacaacagcaaaaataccctgtacttgcagatgaatagcctcagagcagaagacacagctgtgtattactgtgcaaaaccgcccagaggctataactatggtcctttcgactattggggccagggcactctggtcactgtaagctcagccagcacaaaaggtcccagtgtgtttccacttgcaccctgcagcaggtccacctccgagtcaaccgcagcactcgggtgtctcgtcaaagattattttcctgagccggttaccgtctcatggaatagcggtgctctcacttctggtgtgcacacgttccccgctgtactccagtcatcaggcttgtacagcctgtccagcgtcgtgaccgtgccatctagctcactcggaacaaaaacctacacctgcaacgtagatcataagccttccaatacaaaagtggacaagcgcgttgaaagcaaatatgggcctccatgtccaccatgtccagcgccagagttcttggggggtccctctgtcttcctcttccctcctaaacctaaggacaccctcatgatttccagaacacctgaagtaacttgtgttgtggtcgatgtctctcaagaggaccctgaggtacagttcaattggtatgtcgacggagtcgaggtgcataacgcaaaaaccaagcctcgggaggagcagtttaattctacatatagggttgtgtccgttttgacagtgctgcatcaggattggctgaacggtaaggaatacaagtgtaaagtctccaataaaggtctgcccagctctatcgagaagactataagcaaagctaaaggccagcccagagagccccaggtctacacccttccaccatctcaagaagagatgaccaagaaccaggtttcactgacctgtctggtgaaaggtttttacccaagcgacattgccgttgaatgggaatcaaacggccagccagaaaataactacaagaccactccccccgttctggactcagatgggtcctttttcctttatagcaggttgaccgtcgacaagagcagatggcaggaaggaaacgtctttagctgcagtgtgatgcacgaagccctgcacaaccattacacacagaagagcctgagtctctctttgggagcaggaggaggaggatccggaggaggtggatctggtggaggaggatcaggcggaggaggatccggtgcacctcttaagatccaggcctattttaacgaaaccgccgatctgccatgccagttcgcaaattcacaaaatgtgtcactgtctgaattggtggtggtgtggcaggatcaggaaaatctcgtacttaacgaagtctatctcggcaaggagaagtttgattccgtgcattctaaatatatgggacgcacgtccttcgatagcgacagctggaccctgcggcttcacaacttgcagatcaaggataagggcctgtatcagtgcatcattgtgcacaagaaaccaacagggatgatcaggatccatcagatgaactccgagttgtctgtcctg

SEQ ID NO: 1171 - DNA, 1980 bp, synthetic construct
  misc_feature 1..1980: note = LAG3 97-156-sugemalimab antibody heavy chain -CD86 IgV-A13L/Q25I/F33L/H90I polynucleotide
  source 1..1980: mol_type = other DNA
cgcaggtacacagttctttctgtcggacctggtggcttgagatcaggcagactccccctgcaaccgagagtccagttggacgagcggggaagacaacgcggagacttcagtctctggttgcggcctgctagaagagctgatgcgggcgaataccgagctgccgtccatctgcgagatagaggaggtggtgggtctggaggaggaggatctggaggaggagggtctggtggaggtggatcaggggaagtacaacttttggaatctggtggcggtctggtacagcccggaggaagtttgagactgtcctgtgcagcctctgggtttactttcagctcttatgccatgagttgggtgagacaagcccccgggaaaggtctggaatgggtgtcaggcataagcggctccggaggctttacctactatgcggactccgtcaaaggcagattcaccataagccgggataatagcaaaaacactctctacctgcagatgaattccctgagggcggaggacacagcagtgtattattgtgccaagccgccaaggggatacaattatggtccctttgattactgggggcagggaacactggtgactgtttcctccgcctctactaaaggaccaagcgttttccccctcgctccctgttctcggtccacttcagagagtacagctgccctgggatgtctggttaaagactactttcctgaacctgtcacagtgagttggaacagcggagccctgacaagcggtgtccatacatttcctgccgtgttgcagagtagtggcctgtacagcttgagttccgtggtgaccgttcctagttctagtctgggaaccaaaacatacacctgcaacgtggatcataagccttctaataccaaggttgacaaacgagtggagagcaagtatgggccaccttgtccaccttgtcctgcccctgagttccttggaggaccaagcgtattcctgtttccgccgaaacctaaagacaccctgatgatatctcggacaccagaagttacctgcgtggtagtcgacgtttcacaggaggaccctgaggtgcagtttaattggtatgtggatggcgtcgaagtgcacaacgctaagacaaaaccgcgcgaagaacagttcaactctacctaccgcgtcgtctctgtcctcactgtgctccatcaggactggctgaacggaaaggaatacaagtgcaaggtgagtaacaaaggactgccgagctccattgagaagactattagcaaagccaaaggccagccacgggagcctcaggtttatacacttccccccagccaggaggagatgaccaagaatcaggtcagtctgacatgcctggttaagggcttttatccatcagacatcgccgtggagtgggaaagtaacggccagcctgaaaataactataaaactacaccacctgtgctggactccgacggtagtttctttctgtactccagactgacagttgataaatccagatggcaggagggaaacgtctttagctgttccgtgatgcatgaggccctgcacaatcactacacacagaagagtttgtctctttctttgggtgctggaggaggtggttctggaggtgggggaagtggaggaggcggtagtggtggaggaggatcaggagctcctttgaaaattcaggcttacttcaatgagactctggacttgccctgtcagtttgccaactcccagaacatatctcttagcgagcttgtggtactgtggcaagatcaagaaaaccttgtgctgaatgaggtgtatctgggcaaggaaaagttcgattctgtgcatagtaagtacatggggaggacctcttttgactcagacagttggaccctgaggctgcacaatctccagatcaaggacaagggactctaccagtgtatcataatccacaaaaagccaaccgggatgatccgcattcaccagatgaactccgagctgtcagtgctg

SEQ ID NO: 1172 - DNA, 1980 bp, synthetic construct
  misc_feature 1..1980: note = LAG3 97-156-sugemalimab antibody heavy chain -CD86 IgV-A13I/Q25I/F33L/H90I polynucleotide
  source 1..1980: mol_type = other DNA
agaagatatacagttctttccgtgggccctggcggtttgagaagtggcagactcccactgcaacctagagtccagcttgacgagaggggacgccaacgcggtgacttttccttgtggctgagaccagctagaagggcagatgctggtgaatatagggccgctgtgcatctgagagatagaggaggaggaggaagtggaggaggaggatctggaggtggaggttcaggtggtggaggttccggtgaagtacaactgctggaaagcggaggtggtctggttcaacctggcggctctttgagattgagctgtgccgcaagcggattcaccttttccagctacgctatgtcatgggtgaggcaagctcccgggaaaggtctcgagtgggtttccggaattagtggctccggcggtttcacctactacgccgatagcgtcaagggaagattcaccatctcacgcgacaactctaaaaataccctgtatctgcaaatgaattccctcagagccgaagataccgccgtttattattgcgcaaagccacctcgagggtacaactacggacctttcgattactggggacagggcacactggtcacagtgagttctgcttccacaaagggcccttccgtatttcccctcgccccatgcagcagaagcactagcgaatcaaccgcagcacttgggtgcttggtgaaggattactttcctgagcccgttaccgtctcttggaattctggagccctcacttctggcgtgcacactttccccgccgttctgcagtcttcaggtctctactccttgagctctgtggtgactgtgccctcaagcagcctgggaacaaaaacctacacctgtaacgtggaccataagccatctaatacaaaagtggacaagagggtagaatctaagtacgggccaccttgtcctccttgccctgcacctgaattcctgggcggcccatctgtattcctcttcccacctaagcccaaagacacactgatgatatctagaactcctgaggtaacctgcgttgtagtcgatgtttcccaggaagatcctgaagtgcagttcaactggtatgttgacggggtcgaagtgcataacgctaagactaagcctcgagaagagcagtttaacagtacatatagagtggtatccgtcctcactgtcttgcatcaagactggctgaatggaaaggaatacaagtgcaaggtgtcaaacaagggactgccctcatctattgaaaaaacaatcagcaaagctaaagggcaaccaagagagccacaggtctacaccctgcccccaagccaagaggagatgactaagaaccaggtgtctcttacatgtttggtcaaggggttttacccctccgatatcgctgtggagtgggagtcaaacggacaacccgaaaacaattataagactacccctcctgtcttggactcagacggtagtttcttcctgtactcccgccttaccgtggacaagtcacggtggcaggaaggaaacgtgttctcctgctcagtaatgcatgaggcgctgcacaaccactatacacagaaaagcctttccctgtcactcggagctggaggtggtggttcaggaggtggaggctctggaggtggaggttctgggggcggtggtagtggagctccattgaaaattcaggcttacttcaatgagacaatcgatcttccatgccaatttgcgaattctcagaatatttccctgagtgaattggtggtgctgtggcaagaccaggagaacctggtgctcaacgaggtctacctcggtaaagaaaaattcgattccgtgcacagcaagtatatgggacgaacctcatttgactcagacagctggactctcagactgcacaacttgcagattaaagacaaaggcctgtatcagtgcattattattcacaagaagcccactggtatgatccggattcaccagatgaattccgagctgagcgtgctc

SEQ ID NO: 1173 - DNA, 1980 bp, synthetic construct
  misc_feature 1..1980: note = LAG3 97-156-sugemalimab antibody heavy chain -CD86 IgV-A13L/Q25V/F33L/H90I polynucleotide
  source 1..1980: mol_type = other DNA
agaaggtatactgtgctgagtgtaggacctggcgggcttcgatcaggaaggctccctctgcaacccagagtccagttggatgaaaggggtagacagaggggggactttagcttgtggttgcgccctgctagaagagcagatgcgggggagtatcgcgccgcagtacatctgagagatagaggtggaggtggttcaggtggcggaggatcaggtggaggaggaagcggaggtggaggctcaggagaggtacagctcctggaaagtggcggaggattggtacagcctgggggatcactgcgcctttcctgtgcagcctccgggtttaccttcagtagctatgcgatgtcatgggtaagacaggccccaggcaaagggctggaatgggtgtcaggcatttctggctctggtgggtttacctactatgccgacagcgtgaaggggcgcttcactattagcagagacaacagtaagaataccttgtacttgcagatgaactccctgagagctgaagataccgcggtctactactgcgccaaaccccctcgcggatacaattacgggccattcgactactggggtcaagggaccctggtgacagtgtcttctgctagcactaaggggccatctgtttttcctctcgctccctgctcacggtctacatccgagtctacagccgccctcggatgcttggtaaaagactacttcccagagccagtgactgtgagctggaatagcggcgccctgacgtctggtgtgcacacatttcctgctgtgctccagagcagtggactttactcattgagctccgtggtcacagtgccaagctccagcctgggaacgaaaacatacacgtgtaatgtggatcataaaccctcaaacaccaaggtcgacaagagggtggaatctaaatatggtccgccatgccctccatgtcctgctccagagtttttggggggaccgtcagtcttcctgtttccccctaaacccaaggacactctgatgatcagcaggacccctgaggtaacctgtgtcgtggtggacgtctctcaggaagacccagaggtgcagtttaactggtatgtggatggcgtggaagtgcacaatgcgaagaccaaaccacgagaagaacagttcaattccacttacagggtcgtcagcgtgttgacagtgctgcaccaggattggctgaatggtaaagaatacaagtgcaaagtgtccaacaaagggctgccctcaagcatcgagaagactatctccaaagccaaaggtcagccacgagagccccaagtgtacactctgcccccatcccaggaggaaatgaccaagaaccaggttagcctcacttgtctggtaaaaggtttctaccctagcgacatcgccgtagaatgggagtccaatggccagcccgagaacaactacaagaccacccctccagtccttgactctgatggatctttcttcctgtattctcggcttacggtggacaaaagccgctggcaggaaggcaacgtgttctcttgctccgtgatgcacgaggcactgcacaaccactatacacaaaagtccctgtccttgagcttgggcgcaggaggtggcggttcaggtggtggaggatctggtggtggagggagtggtggaggaggtagcggtgcaccactcaagatacaggcctactttaatgaaaccctggacctgccctgccagtttgccaattcacagaatgtgtcccttagcgagctggtcgtgctttggcaggaccaggaaaacctggtcctcaacgaggtgtacctggggaaggaaaaattcgacagtgtccactccaaatacatgggccgcacaagcttcgactccgatagctggaccctccggctgcacaacctgcagattaaagataagggtctgtatcagtgcattataatacacaagaagccaaccggaatgatcaggatccatcagatgaactcagagctgtctgtgctg

SEQ ID NO: 1174 - DNA, 1980 bp, synthetic construct
  misc_feature 1..1980: note = LAG3 97-156-sugemalimab antibody heavy chain -CD86 IgV-A13I/Q25V/F33L/H90I polynucleotide
  source 1..1980: mol_type = other DNA
agaagatatactgttctgtctgtcggaccaggaggccttaggagcggtaggctgccattgcagccgagggttcaattggacgagagaggcagacagcgcggggattttagtctctggttgagacctgcaaggagagcagatgccggggaatacagagctgccgtgcacctgagagatagaggaggaggtggatcaggaggtggaggatctggaggaggaggatctggaggaggcggaagcggagaggtacagcttctcgaatccggtggaggactggttcaacctggcggtagtctgcgactgtcctgcgcagcttccggcttcacgtttagcagctatgctatgtcatgggtgagacaggccccagggaagggactggagtgggtttcaggtatcagcggctccggtggctttacatactatgcggactcagtgaagggaaggtttaccataagccgggacaacagtaagaatactctgtatctccagatgaatagcctcagagcagaagatacggcggtctactattgcgctaaaccaccacgaggctacaactacggcccatttgactactgggggcagggaaccctcgttactgtctcctccgccagcaccaaaggaccaagcgtgtttccacttgctccctgttcacgctctacatccgagtctaccgctgccctgggctgccttgttaaggactatttcccggagcccgtgaccgttagctggaatagcggagcccttacttctggggtacatacgtttcctgcagtgctccagagctccgggttgtatagcctgagctctgtagtaacagtgccatcaagttcattgggtaccaagacttacacgtgtaacgtagaccacaagccgtccaacacaaaggtcgataagcgagtggagagtaagtatggaccaccctgtcctccttgtcctgctcccgaattcctgggtggacccagcgtattcctgtttcctccaaagccaaaggacacactgatgatcagccgaacgccagaagtgacttgcgtggtggtcgatgtgtcacaggaagatcctgaggtgcaattcaactggtatgtggacggcgtcgaggtgcataacgccaagacaaagccacgggaagagcagttcaattccacttaccgggtcgtctctgtgcttaccgtgttgcatcaagactggctgaatggcaaggagtacaaatgtaaagtgagcaacaagggcctgccctcatccatcgagaaaacgatcagcaaagcaaagggacagcctagagagccccaagtgtatactttgcctccaagccaagaagagatgactaaaaaccaggtgtctctcacctgcttggtgaaagggttctatccctctgacatcgctgttgagtgggagtctaacgggcagcccgaaaataattataagacaaccccacctgttctcgattcagatgggagtttttttctgtatagtagactgaccgtggataagtcacgatggcaggagggcaatgttttctcttgctccgtcatgcacgaggcactgcataatcactatacgcagaaaagtctctctctttccttgggagctggtggaggtggaagtggaggtggtggttctggcggaggaggctctggaggaggaggatctggggcaccactcaaaattcaggcctatttcaacgagaccattgatctgccctgtcagttcgccaattcccagaacgtgtccctctccgaattggtagtcctctggcaggatcaggaaaaccttgtgctgaatgaggtgtatctgggcaaggaaaagtttgacagcgttcattctaagtatatgggacgcacatcttttgactctgatagctggacattgcggcttcacaacctgcagattaaggacaaaggcctgtatcagtgcatcataatccacaagaagccaaccggaatgattcggatacatcagatgaacagtgagttgtcagtgctc

SEQ ID NO: 1175 - DNA, 1980 bp, synthetic construct
  misc_feature 1..1980: note = LAG3 97-156-sugemalimab antibody heavy chain -CD86 IgV-Q25I/F33L/I89L/H90I polynucleotide
  source 1..1980: mol_type = other DNA
agaaggtacacagttctctctgtgggacctgggggattgagatccggtaggctcccattgcagcctagagtccaactggacgagcgggggagacagagaggtgacttcagtctgtggttgagacctgccagaagggctgacgctggcgagtacagagctgcagtacatcttagagatagaggaggtggtggctctggtggaggaggtagtggaggagggggatctggtggtggtggtagtggagaagttcagcttttggagagtggcggggggctcgtacaacctggtggatctctccgactctcatgtgccgcaagcggattcactttcagcagttatgccatgtcttgggtcagacaggctccgggcaagggacttgagtgggtaagtggcataagcgggtccgggggatttacgtactacgcagattcagttaagggccgctttacaatctctcgggacaacagtaagaacactctgtacctgcagatgaacagcctgagagcagaggataccgcagtttattattgcgccaagcctccccggggatataattatggcccctttgattattggggccagggaactttggtgaccgtgtcttctgccagtaccaaaggaccgagcgtgtttcctctggcaccttgcagcagaagcacctcagagtctaccgccgctttgggctgtttggtgaaagactatttccccgaaccggtcactgttagctggaactccggtgccctcacaagtggcgtgcacaccttccctgctgtgctccagagttcaggcctctacagtctcagtagtgtggtgacggttccttccagctctttggggacaaagacctacacctgcaacgtggaccacaagccaagcaatacaaaggtggataaaagagtggagagcaagtacggccctccttgtcctccctgtccagcaccagagtttctcggcggaccgagcgtgtttttgttcccccctaaaccaaaagacaccctgatgataagtcgaactcctgaagttacatgcgtggtggtggatgtgagtcaggaagacccagaagtgcagttcaattggtatgtggatggagtggaggttcacaacgccaaaaccaaaccacgggaggagcagtttaatagcacgtaccgagtggtttctgtgcttactgtgcttcaccaggactggctgaatggcaaggagtacaaatgtaaagtgtccaataaaggccttccgagctccatcgaaaaaactatcagtaaggctaaaggacagccacgggagcctcaggtttataccctgccaccaagccaggaggaaatgacaaaaaaccaggtctcacttacctgtctggtgaaagggttctacccgtcagatatcgctgtggaatgggaatccaatgggcaacccgaaaacaactataagacgaccccgccagttctggactccgatggtagttttttcctgtacagccgcttgactgtcgacaagtctcgctggcaggaaggaaacgtgttttcctgtagtgtaatgcatgaggcactccacaaccactacacacaaaaatcccttagtctgagccttggagctggtggaggaggttcaggaggaggtggatctggtggcggaggttctggaggaggaggatctggcgctcctctcaagattcaggcatatttcaacgaaacagccgacctcccatgccagtttgccaacagtcagaacatttctctttccgagctggtggtcttgtggcaggaccaggagaatttggtgctcaacgaggtctacctgggcaaggagaaattcgactcagtgcattcaaagtatatgggaaggacctcctttgatagtgattcctggacacttcggctccacaacctgcagatcaaggacaaaggactctatcagtgtatcctgattcacaagaaaccgaccggtatgatccgaattcaccagatgaacagcgagctttctgttctc

SEQ ID NO: 1176 - DNA, 1980 bp, synthetic construct
  misc_feature 1..1980: note = LAG3 97-156-sugemalimab antibody heavy chain -CD86 IgV-Q25I/F33L/M60R/H90I polynucleotide
  source 1..1980: mol_type = other DNA
agaaggtacactgtattgtctgttgggcccggtggtcttagatcaggtcgcctgccactgcagccaagagttcagctggatgaacggggcaggcaaaggggggacttctctctctggctcagacctgcacggagagcagatgcaggtgagtatagagccgctgtgcacctcagagatagaggcggtggaggaagcggtggaggggggtcaggaggaggcggtagtgggggaggaggatctggtgaggtacagctcctggaatcaggcgggggactggtacaaccagggggatctctgaggttgtcttgtgccgcctccgggttcactttcagctcctacgccatgagttgggtgagacaagcacccggcaaaggtttggagtgggtgtcaggtataagcggatccggcggtttcacatactacgccgacagcgtgaagggaaggttcactatttccagggacaactctaagaacaccctgtatttgcagatgaacagtctgagagcagaagacacagccgtgtattactgtgccaagccaccccgggggtataattatgggcctttcgactactggggacagggcaccttggtgactgtgtcatctgcttctaccaaaggcccttctgtgtttcctctcgcgccttgttcccggagcacctctgagtctactgccgccctcggatgcttggtgaaggattactttcccgaacccgtaactgtgtcatggaacagtggggcgctcacatcaggagtccatacgttcccagctgtactgcagagcagcggactgtacagcctgtctagcgtggttacggtcccctccagctccctgggtacaaaaacttacacctgcaatgtggaccataagccttcaaacacaaaggtcgataagcgggttgagagcaagtacggaccaccctgtccaccctgtccagctccagagtttctcggggggcctagcgtttttctgtttccccccaagcctaaggacaccctgatgatctcccggacccccgaggtcacttgtgttgttgtggacgtgtcacaggaggaccctgaggtccaatttaactggtacgtcgatggcgttgaagtgcacaatgcaaaaaccaagcccagagaagaacagttcaacagcacctaccgagtggtatccgttctcacggtcctgcaccaggattggcttaacggaaaagagtataagtgcaaagtctctaacaagggcctgcccagtagtatcgagaagactatctccaaggctaagggccagccacgagaaccgcaagtctacacattgccccctagccaagaggaaatgacaaaaaaccaagtttctctgacctgtctcgtgaaaggtttctacccttccgacatagctgtggagtgggagagcaatggccagcctgaaaacaactacaagacaacgcccccggttctggacagcgatggcagttttttcttgtactcccgactcaccgtggacaaatccagatggcaggagggaaatgttttcagctgttcagttatgcatgaggctctgcataatcattatacacagaagtccctgtctttgagtcttggagcaggtggaggaggatctggaggtgggggttcaggtggaggtggttccggtggaggcggatctggagcacctcttaagattcaggcctattttaacgaaactgccgacctgccttgccagttcgccaattcacagaatattagcttgagcgagttggttgtcctgtggcaggaccaggagaatttggtgctcaacgaggtgtatctggggaaggagaaattcgacagcgtgcactctaagtatcgggggcgaaccagctttgactctgattcttggactctgagactccacaacttgcagattaaagacaaagggctctatcagtgcataattattcataaaaagcccaccggcatgattcgaatacaccaaatgaatagcgaattgtccgttctc

SEQ ID NO: 1177 - DNA, 1980 bp, synthetic construct
  misc_feature 1..1980: note = LAG3 97-156-sugemalimab antibody heavy chain -CD86 IgV-Q25V/F33L/I89L/H90I polynucleotide
  source 1..1980: mol_type = other DNA
agaagatacacggtgttgtccgtaggaccagggggactgagatctggcagactgcccctccaacctagagtccagttggatgaaagaggcaggcaaagaggggacttcagcttgtggctgagacctgcaagacgagccgatgccggcgagtacagagctgctgtgcacctgagggatagaggaggaggaggatctggaggaggaggatctggaggtgggggatctggtggaggaggctcaggtgaagtgcagctgctggaatccggaggtggattggtccagccaggaggaagtttgcgacttagctgtgccgcctctggctttaccttctcttcttacgccatgtcatgggttagacaggccccaggaaaaggactggagtgggtgtcaggcattagtgggagcgggggcttcacttactacgcagattcagtgaagggcagattcacaatttcacgggataatagtaaaaacactctgtatctgcagatgaactccctgcgggccgaggacacagcagtctactactgcgctaagccacccaggggctataattatggaccattcgactactggggacagggaacactggtcaccgtttcctccgcctctacaaaagggccgtccgtgttccctcttgcaccttgttcccggtccacaagcgagagtacagctgcgctgggatgcttggtcaaagactactttcccgagccagtaaccgtaagttggaactcaggggcacttaccagcggcgtacatacattccccgcagtgctgcagtccagtggactctatagcttgagttctgtggtcacagtaccctcaagttcactggggacaaaaacttatacctgtaacgtggaccataagccctccaacactaaagtcgacaagcgcgtagagagtaaatatggtcctccctgtccaccatgtccagcacccgagttccttggtgggccatctgtgttcctgttcccgccaaagccaaaggatacactgatgatcagccggacaccagaggtaacctgcgtagttgtggacgtgagtcaagaggaccctgaggtgcagttcaattggtatgtagacggagtggaagttcacaacgcgaaaacaaagcctagagaggaacaatttaattctacatatagagtagtctcagtgctgacagtgttgcatcaggactggctgaacggtaaagaatacaagtgcaaggtcagcaacaaaggcctgccttctagcatcgagaaaacaatcagcaaagccaaaggtcagccacgcgagccgcaagtgtacactttgccacccagtcaggaggagatgacaaaaaatcaggtcagcctgacttgcctggtgaaagggttctatccatcagacattgccgttgaatgggaatctaatggacagccagagaataactacaaaacaacacctcccgttctcgatagcgacggatcctttttcttgtattcacgcctgacagtcgacaagtccaggtggcaagaagggaatgtgttctcttgcagcgtgatgcacgaggccctgcacaaccattacactcagaaatccctgtccttgtctttgggagccggaggtggaggatctgggggcggaggtagtggagggggaggtagtggtgggggtggatcaggagcacctctgaagattcaggcatatttcaacgaaacagcagatttgccatgccagtttgccaactcacagaacgtatcactgagcgagcttgttgtactgtggcaggaccaggaaaacctcgtgctgaatgaggtgtacctgggaaaagagaaattcgacagcgtgcactccaagtatatgggaaggacatctttcgatagcgactcatggactctcagactgcacaatttgcagatcaaggacaagggcctgtaccaatgtattcttattcacaagaagcccaccgggatgatccgaatccatcagatgaacagcgagctttctgttctg

SEQ ID NO: 1178 - DNA, 1980 bp, synthetic construct
  misc_feature 1..1980: note = LAG3 97-156-sugemalimab antibody heavy chain -CD86 IgV-Q25V/F33L/M60R/H90I polynucleotide
  source 1..1980: mol_type = other DNA
agaagatatactgttttgagcgtgggccctggaggacttagatccggaagacttcctctgcagcccagggtccaacttgacgaacgaggtaggcagaggggggacttcagtctttggcttagaccagcacgcagggccgatgcaggggaatatagagctgcggtgcatttgcgagatcgaggtggtggaggaagtggtggaggaggatctggaggtggaggatcaggaggaggaggctcaggagaagtccagttgctggagtctgggggcggacttgttcaaccaggcgggtctttgagattgagctgcgccgcatcagggtttacgtttagctcctacgccatgtcatgggttaggcaggctcctgggaagggcctggaatgggtctctggcataagtggcagcggcggtttcacatactatgccgattccgtcaagggcaggtttaccatttccagagataacagtaaaaatacactgtacctgcaaatgaatagccttcgggcagaagacaccgccgtgtactattgtgccaagccccccagagggtacaactatggcccatttgattactggggtcagggcaccctcgtcaccgtttccagtgcttctactaaggggccttctgtttttcctctggctccctgctcccggtcaacttctgagtcaacagctgccctcggctgtctggtgaaagattattttcccgaacccgtcaccgtgtcatggaatagcggagcgctgactagcggggtccatacattccccgcagtgttgcagtctagcgggctctattcactgtccagcgtggtgacagtgccatccagtagcctgggaacaaaaacatacacttgcaatgtcgaccataaaccgtccaatacaaaagtcgataaaagggtagagagcaagtacgggccaccttgtcctccttgtccagcccctgagtttttggggggtccctcagtcttcctgtttccaccaaagccgaaagacacactgatgatctctcgcactcctgaagttacctgcgtggtggttgacgtgtcacaggaagacccagaggtacagttcaactggtacgtggacggcgttgaagtgcataacgctaaaaccaagccgcgcgaggagcaattcaacagtacctatagagtggtcagtgttctgacagtgctgcatcaggattggctgaatgggaaggagtataaatgcaaagtcagcaacaaaggtctgccttcatctatcgagaagacaatttcaaaggcaaagggtcagccacgggaaccgcaggtgtataccttgccacctagtcaggaggaaatgacgaagaaccaagtttccctgacttgtctggtcaagggcttttaccccagcgacattgctgtggagtgggagagcaatggccagcccgaaaataattacaaaactacacctcccgttctggacagtgacggatccttcttcttgtacagccgcctcacagtagacaaatcacggtggcaggaaggaaatgttttctcatgttctgttatgcacgaagctctgcataatcattacactcagaagtccctcagtttgtcactcggagccggaggaggaggatcaggaggaggaggatctggtggtggaggatctggtggaggtggaagtggagcccccctgaaaattcaggcctattttaacgaaactgccgacctcccatgtcagtttgccaattcccagaatgtgtccttgagcgaactggtggtgctgtggcaggaccaggagaatctggtgttgaacgaagtgtatttggggaaagaaaaatttgactctgtccactcaaaatacagggggaggacctcatttgattcagattcctggactctgaggcttcataacctccagatcaaagacaagggattgtatcagtgtatcatcatccacaaaaagcctacaggcatgatcaggattcaccagatgaatagtgaattgtcagtgctc

SEQ ID NO: 1179 - DNA, 1980 bp, synthetic construct
  misc_feature 1..1980: note = LAG3 97-156-sugemalimab antibody heavy chain -CD86 IgV-Q25F/F33L/H90I polynucleotide
  source 1..1980: mol_type = other DNA
cgcagatataccgttttgtcagtgggcccaggaggtcttagatcaggacggttgcctctgcagcctcgcgttcagctggatgaaagaggccgacaacgcggcgatttcagcttgtggctgaggcctgctcggagagctgatgccggggaatacagggccgctgtccatttgcgagatagaggaggtgggggttcagggggtggaggatcaggtggagggggatcaggtggaggagggagtggtgaggtccagttgctggagtctggtggtggccttgtccaacctggcgggagtcttcggctgtcttgtgctgcttccggttttacctttagctcctacgccatgagctgggtcagacaggctcctggtaagggtttggagtgggttagcggaatatcaggaagcgggggtttcacctactacgccgactctgttaaaggaagattcaccatctcccgggataactcaaaaaatacactgtatcttcagatgaatagtctgagagccgaagacaccgccgtgtactactgcgcaaaacctccccgggggtacaattacggcccctttgactattgggggcagggtactctcgtgacagttagctccgcctctacaaaggggccctctgttttcccactcgcgccctgtagcaggtctacatccgaaagtaccgctgctctcggctgtctggtcaaggactacttccctgagccggtgactgtgagctggaacagtggagcattgacttcaggtgtgcatacatttccggcagtcctgcagagcagtggcctgtatagcctgtctagtgtagtgactgtgcccagttccagccttggcaccaaaacatatacttgcaatgtcgatcataagccatccaataccaaggtggataagagggtcgaatctaaatatgggcctccttgtccaccttgtcccgctccagagttcctgggcggaccatctgtatttctctttccacctaagccaaaggatactcttatgatctctcggaccccagaggtgacctgcgtcgtagttgatgtcagtcaggaagaccccgaagtgcaatttaattggtacgtcgacggcgtcgaggtgcacaacgcaaagaccaagccaagggaggagcaatttaatagtacctatcgggtagtcagcgtgctgaccgtcctgcatcaggattggctgaacggcaaagaatacaagtgcaaggtcagcaataaaggtttgccatccagcatcgagaaaaccatctcaaaggctaaaggacagccccgggagcctcaggtttatacactgcctccctctcaggaggaaatgactaagaatcaggtgtccctgacgtgcctcgtgaaagggttctatccctcagacatcgctgtcgagtgggagtcaaacggccagcccgagaacaactacaaaacaacccctcctgtgctcgattcagatgggagcttctttctctattcaagactgacagtggataagtcacggtggcaggaaggtaatgtcttttcctgctcagtgatgcacgaggctctgcataatcattatactcagaaaagcttgagcctcagtctcggagcaggtggaggcggttccggtggaggaggaagtggaggaggtggttctggaggagggggatctggtgcgcctctcaagattcaggcctactttaatgagacagcagacctgccctgccaatttgctaatagtcagaatttcagcctgagtgaactggtggtactgtggcaggatcaagaaaacctggttctgaatgaagtgtatctggggaaagagaaattcgattctgtgcatagcaaatacatgggcaggactagcttcgactcagacagctggaccctgaggctgcacaatctgcaaatcaaggacaaagggctgtatcagtgtattataattcataaaaagccaactggcatgattagaatccaccagatgaatagcgaactgagcgtcttg

SEQ ID NO: 1180 - DNA, 1980 bp, synthetic construct
  misc_feature 1..1980: note = LAG3 97-156-sugemalimab antibody heavy chain -CD86 IgV-Q25I/F33L/H90F polynucleotide
  source 1..1980: mol_type = other DNA
agaagatatactgtgctttcagtaggacccgggggcctgagaagcggtagacttcctctgcaaccccgcgtgcaattggacgagagagggaggcagagaggagatttctctctgtggttgaggccagccaggagggctgatgcgggtgaatatagagccgccgttcatctgagagatagaggtggcggaggttccggaggtgggggtagtggaggaggaggttctggaggaggcgggtcaggagaagttcagctcctggagtcaggtggcggacttgttcagcctggaggctcactgagactctcctgtgccgcctctgggtttacctttagcagctatgcaatgtcatgggtcagacaggccccaggaaagggtctcgagtgggtgtccggaatatcaggcagcggtggatttacatattatgcagactctgtcaaaggcaggttcactattagccgcgataatagcaaaaacaccctgtacctgcaaatgaattccctgcgggccgaagatacagctgtctactattgcgccaaaccccctagggggtacaactatgggccgttcgattactgggggcaggggacactggtgacagtgtcatctgccagtaccaaaggaccaagtgtgtttcctttggccccctgtagtaggagcacatcagagagtacagcagccttgggttgccttgtcaaggactactttcccgagcccgtcaccgtatcttggaattccggagctctgacatccggtgtacatactttccccgccgtgttgcagagcagcggactgtattctctctccagcgtggttacagttccttcctcctcccttggcaccaagacctatacatgtaacgtggaccataaacctagcaatacaaaagtggacaaacgcgttgagagcaagtacggaccaccttgtccaccttgccctgccccagaattcttgggaggcccctccgtctttttgtttcctccgaaacccaaagacactttgatgattagtcgcaccccagaagtcacatgcgtggttgtggacgtaagccaggaagatcctgaggtccaatttaattggtacgtggatggcgtggaggtccacaatgccaagacaaaaccaagggaagaacagttcaatagcacctacagggttgtgagtgttttgacagtgctgcatcaggattggctgaacgggaaggaatataaatgcaaagtgagcaacaaaggtctgccctccagtatcgagaagaccatctccaaggccaaaggccagccaagagaaccacaggtctatacgctgcctccttcccaggaagagatgaccaaaaatcaggtgagcctcacctgcctggtcaagggcttttacccatccgacattgcagtcgagtgggaatcaaatggccagccggaaaataactacaagaccacgccgccagtgttggactctgatggcagcttttttctgtatagccggctgaccgtggataaaagtaggtggcaggagggcaacgtcttcagttgttctgtcatgcacgaggctctgcataaccattacacacaaaaaagtctgagtttgagtcttggcgcaggaggaggaggatctggcggaggaggatcaggtggaggagggtctggcggaggtggatcaggagctcctctcaagatccaggcctatttcaatgaaactgccgatctgccatgtcagtttgccaatagccaaaacatttctctctctgagctggttgtgctgtggcaagatcaggagaacctggttctgaatgaagtgtatcttggaaaagaaaaattcgactcagtgcacagcaagtacatggggcgaacttctttcgattctgattcatggacattgcggttgcataatctgcaaattaaggataaaggactgtaccagtgcatcatctttcataagaaaccgaccggtatgattcggatccaccagatgaattccgaactctcagtgctt

SEQ ID NO: 1181 - DNA, 1980 bp, synthetic construct
  misc_feature 1..1980: note = LAG3 97-156-sugemalimab antibody heavy chain -CD86 IgV-Q25I/F33A/H90I polynucleotide
  source 1..1980: mol_type = other DNA
agaaggtatactgtgctctctgtgggtcctggcggtctgagatcaggcaggcttcccttgcagcctagagtccagctggatgaacgcggcagacagagaggggactttagtctgtggcttagaccagcaaggcgggctgacgcaggggaataccgagctgcagtacatctgagagatagaggaggaggaggctctggaggaggaggatctggtggtggtggctcaggaggtggaggtagcggtgaagtccaacttctggaatctggtggcggtttggtacagcctggtggcagtttgagattgagctgcgctgcttccggctttacgtttagctcctacgccatgtcttgggtgcgacaggctcccggaaaaggcctcgaatgggtgagcggaatctctggatctggtggcttcacctactacgctgacagtgtgaagggcagattcactatctccagggataatagcaagaacaccctgtacttgcaaatgaactcccttagagctgaggataccgcagtgtattattgcgcaaagccaccccggggctataattatgggcctttcgattactggggacagggcaccttggtcaccgtgtcatccgcctcaactaagggcccatccgtttttcccctggctccttgctcaaggtctaccagtgagagcacagccgcactgggctgtcttgttaaggattacttccctgaacctgtaaccgtttcctggaattccggcgccttgacttccggcgtgcacacattccccgcggttcttcagtcaagtggattgtattctctgagcagcgtcgtcacagtgcctagctcttctctcgggaccaagacctacacctgtaacgtcgaccataaacccagtaacaccaaagtcgataagcgggtggagtcaaaatatggacctccatgtccaccgtgtccagctccagagttccttggcggacctagcgtgttcctgttcccacctaagccaaaggataccctcatgatttcaaggacccctgaagtcacttgcgtggtggtagacgtcagccaggaagacccagaggtgcagtttaactggtatgtcgatggtgtggaggtgcacaacgctaagaccaagcccagggaagagcaattcaactctacttatcgggtggtgtcagtgcttactgtgctccatcaagattggctgaacggcaaggaatacaagtgtaaggtctctaataaaggactgcctagtagtatcgaaaagactataagtaaggcaaagggtcagccaagggagcctcaggtctacacactgcctccctctcaggaggagatgaccaagaaccaggtaagcctgacatgcctggtgaagggcttttaccccagcgatatcgctgttgagtgggagtccaacggccagcctgaaaacaattataagacaaccccaccagtgctggacagcgacggatccttctttttgtacagcaggcttactgtcgataaatctcggtggcaagaggggaatgtgtttagttgctctgtgatgcacgaagctctgcacaaccattacacccagaaatcactttcactgtctttgggagctggtggtggaggctctggtggaggaggttcaggaggaggaggctcagggggaggtggatcaggagctccactgaagatacaggcgtactttaacgagacagcagatctcccatgtcagtttgcgaacagccagaacatatcccttagcgaactggtcgtggcttggcaggaccaagagaatctggttctcaatgaggtctacctgggcaaagaaaaattcgactctgttcactcaaagtacatggggagaacgtcctttgacagtgacagttggactctgcggttgcacaacttgcagatcaaagataagggcctttaccaatgcatcatcatacacaaaaaaccaactggaatgatacggatacatcagatgaactctgagctgagcgtgctc

SEQ ID NO: 1182 - DNA, 1980 bp, synthetic construct
  misc_feature 1..1980: note = LAG3 97-156-sugemalimab antibody heavy chain -CD86 IgV-Q25I/H90I polynucleotide
  source 1..1980: mol_type = other DNA
aggaggtatacagtcttgtcagttggaccgggtggattgagaagcggtagactgccattgcagcctcgagtgcagcttgacgaaaggggcaggcagcgcggtgatttcagcctctggctgagaccagctaggagagccgatgctggtgagtatagagcagctgtccacctgagggatagagggggtggtggatcaggtggaggaggatctggtggaggaggaagtggtgggggagggtctggagaggtccagttgctggaaagcggaggtggattggtgcagcctgggggatctttgcgattgagctgtgcagcgagcgggtttactttctctagctacgcaatgagttgggtgagacaggcccctggaaagggtcttgaatgggtttctggaattagtgggtccggtgggtttacatattatgctgactcagtcaagggccggtttactatcagcagagataatagtaagaatacgttgtatctgcagatgaactctcttcgggcagaggacacagccgtgtattactgtgcaaagcccccaagaggctacaattacggtccttttgattactggggccagggaaccctggtgactgtgtcttccgcgagcaccaaggggcccagcgtgttccctttggcaccttgcagtagatcaacttctgaatccaccgccgccctgggatgcctggttaaggattatttccccgagcccgtcacggttagctggaacagcggtgccctcacctcaggcgtccacactttcccagccgttcttcagtcctcaggactctactctttgagttctgtggtcacagtacctagttccagcttgggcaccaaaacctacacttgtaacgttgaccataagcctagcaacacaaaggtggacaaaagggtggaatccaagtatggacctccttgtcccccttgtccagctcccgaatttctgggcggtcctagtgtatttctgtttcctccgaaacccaaagacacccttatgatcagcagaactcccgaggtaacgtgtgtcgtcgtggatgttagccaggaggaccctgaggtacaattcaattggtatgtggacggggtggaagtccacaatgcgaagacaaagcctcgcgaagagcagtttaacagcacatatagggtagtttctgtgctgaccgtgctgcatcaagactggctgaacgggaaggaatataagtgtaaggtgtccaataaggggctgcccagctccattgagaaaacaatctcaaaagcgaaggggcagcctagggaaccccaggtatacacactgcctccgagtcaggaggagatgaccaagaatcaagtgtccctgacctgcctggtgaaggggttctacccgtccgacatcgccgtggaatgggagagcaatggccagcccgagaataactacaaaaccactcctcccgtgctggactctgatggatccttttttctgtatagtaggttgaccgtggacaagagtcgctggcaggaaggcaatgtgttctcatgtagcgtgatgcatgaagcgctgcacaaccattacacacaaaaatctctcagtctgtctttgggagcaggtggcggaggatctggaggaggtggatctggaggaggagggtcaggcggtggaggtagtggtgcacctctcaaaatccaggcctacttcaacgaaaccgctgacctcccttgtcagttcgctaacagccagaacatttcactctcagaattggttgtgttttggcaggatcaggagaacttggttctgaatgaggtgtatctgggcaaagagaagtttgatagcgtgcactcaaaatatatggggcgaacttctttcgactcagactcttggactctcagactgcacaacctgcagattaaagacaaaggactgtaccagtgcattatcatacataagaaacctacaggaatgatacggattcaccagatgaacagtgagctcagcgtgctg

SEQ ID NO: 1183 - DNA, 1980 bp, synthetic construct
  misc_feature 1..1980: note = LAG3 97-156-sugemalimab antibody heavy chain -CD86 IgV-Q25V/H90V polynucleotide
  source 1..1980: mol_type = other DNA
aggaggtatacagtgttgtcagtcggacctggaggtctcagaagcggcaggctgcctctgcagccccgggttcaacttgacgaacgagggcggcaacggggagacttctcactgtggcttagaccagcgcggagggccgatgctggagagtaccgcgctgccgtccacctgagggacagaggaggcggtgggagcggaggtgggggcagcgggggtggcggctccggtggaggaggatctggggaagttcagctcctggaaagtggggggggcttggtacagccaggcggttctctcagactgtcctgcgccgcatccggattcacctttagttcttatgcaatgagttgggtgcggcaagccccaggcaaaggtctggaatgggtaagcggcatcagcgggtcaggcgggttcacctactacgctgattctgtgaaaggcagattcaccatcagccgagataacagcaagaatacactgtacttgcagatgaattcccttcgcgccgaagataccgctgtctactactgcgcaaaaccccctagaggttacaactacggcccattcgactactggggacagggtacactcgtgaccgtttctagcgcctccacaaaagggccaagtgtgtttcctctcgctccatgttcacggagtaccagcgagagcactgcagcccttgggtgtctggtgaaggattacttccctgagccggttacagtgagctggaattcaggcgccctgacaagtggggtccatacgttccccgcagtacttcagtcttctggtttgtacagcctcagcagtgtagtgactgtcccatccagttcactgggaaccaagacctatacatgtaatgtcgatcataaaccttctaacaccaaggtggacaagcgagttgaatcaaagtacgggcccccatgtcccccctgcccggccccagagtttctgggagggccttccgtcttcttgtttcctcccaaacccaaagacaccctgatgatttctcgaacaccggaagtgacctgcgttgtagtggacgtcagccaggaggaccctgaagtccagttcaactggtacgttgacggcgtggaagtgcataatgctaagactaagccaagggaggagcagtttaactccacctatagagtggtcagtgtgctgaccgtgctgcaccaagattggctgaacggaaaagaatataagtgcaaagtctccaataaggggcttcccagctcaatcgaaaagacaatctctaaggcaaaggggcaaccaagagagccccaagtatacactctgcctcccagccaagaggagatgaccaagaaccaggtttctctgacttgtctggttaagggattctaccccagtgacatcgctgtcgaatgggagagcaatggtcaacctgaaaacaattacaagacaacgcctccagtattggacagcgacggatcttttttcttgtactccagactgaccgtcgataaatctaggtggcaggaggggaatgtattctcctgcagcgttatgcacgaggcccttcataatcattatacgcagaaaagcttgtccctgtcactgggagcaggaggcgggggaagcggaggcggcggttcaggcggcggagggtcaggtggagggggctccggagcgcctctcaagattcaagcatactttaacgagacggccgatctgccttgtcagttcgcaaactcccagaacgtctccctttctgagttggtggtcttctggcaggaccaagagaatttggtgctcaacgaagtctacttggggaaggagaagtttgattctgtccacagtaagtatatggggaggacatcattcgactctgactcctggaccctcaggcttcataacctgcagattaaggataaaggcttgtaccagtgcatcattgtgcacaagaaaccaacagggatgatccggattcaccaaatgaactctgagctctccgtgctg

SEQ ID NO: 1184 - DNA, 1980 bp, synthetic construct
  misc_feature 1..1980: note = LAG3 97-156-sugemalimab antibody heavy chain -CD86 IgV-Q25V/H90I polynucleotide
  source 1..1980: mol_type = other DNA
aggagatatacagtgttgtctgtgggaccgggtgggcttagaagtgggagattgccacttcagccaagagtccaactcgatgagcgcggaagacagagaggcgactttagcctctggttgaggccagctaggagagctgatgccggcgagtatagagccgccgttcatcttcgagatagaggaggaggaggttcaggtggaggaggttcaggggggggaggaagtggaggaggaggatctggagaggttcagttgctggaatctggaggtgggctggttcaacccggaggaagcctcagactgagctgcgctgcaagcgggttcacatttagttcatatgcgatgtcatgggtgaggcaagcgcctggcaaagggctggaatgggtgtccggcatctccggaagtggtggctttacatactatgccgatagcgtcaagggaaggtttacaatttcacgagacaattctaaaaacaccctgtatcttcagatgaattccctgagagctgaggacacagccgtgtattactgcgccaaaccacctcgaggatataactacggcccattcgactattgggggcaaggtactctggtcaccgtctctagtgccagcaccaagggtccttctgtttttcccctggcgccttgttcccggtctacaagtgaaagtaccgccgccctgggttgtctcgttaaggactacttccctgaacccgtgactgtgagttggaactccggcgccctgacgtcaggcgttcatacatttcctgctgtgctgcagtcaagtggcttgtacagtctcagcagcgtggtgacagtccctagtagcagtctgggcactaagacatatacgtgtaacgtcgatcacaagcctagcaatactaaggtggacaagcgggtagagtctaagtatggtcctccctgtccaccttgcccagctcctgaattcctgggaggaccctcagtgtttttgttcccacccaaacccaaggacacactgatgatctcacgaacccctgaagtaacttgcgttgttgttgatgtgtcacaagaagaccccgaggtgcagtttaattggtacgtcgatggtgtggaagtccacaacgccaaaacaaaaccaagagaggaacagttcaattccacatatcgcgtggtcagtgttcttacagtgctgcaccaggactggctcaatggcaaagaatacaagtgtaaggtgagcaacaagggccttccatcatccatcgagaagaccatctccaaggcaaagggacaaccccgcgagccacaggtctacactttgccaccgtcccaggaggagatgaccaagaaccaggttagcctcacttgtttggtgaagggcttttacccctctgacatcgcagtcgaatgggaaagtaacggacagccggaaaacaattacaaaaccacacctcccgtgctggacagcgatggctcttttttcctgtattcccgcctgaccgtcgataagtcaaggtggcaggaaggcaatgtgtttagttgctctgttatgcacgaagccctccacaatcattacacacaaaaatctttgtcactttctcttggagctggaggaggaggtagtggaggtggaggtagtggtggaggaggatctggtggggggggaagtggagctcctctgaaaatacaggcctacttcaacgaaaccgcagatttgccctgccagttcgccaatagccaaaatgtgagtctctccgagctcgtggtgttctggcaggatcaggagaatctcgttctcaacgaagtgtacctgggcaaagagaaattcgatagtgtgcactctaagtatatgggaagaacttcttttgatagcgacagctggaccctgagacttcacaacctgcaaatcaaagacaagggcctgtatcagtgcatcatcattcataaaaaacccactggcatgatacgcatccaccagatgaactctgagctctctgttctg

SEQ ID NO: 1185 - DNA, 1980 bp, synthetic construct
  misc_feature 1..1980: note = LAG3 97-156-sugemalimab antibody heavy chain -CD86 IgV-Q25F/H90I polynucleotide
  source 1..1980: mol_type = other DNA
agaagatatacagttctgagcgtcggacctggtggactcaggagtggcagactgccactccagcccagggtgcagcttgatgagcgcggaagacagcggggcgatttctcactttggctgaggcccgccaggagagcagatgcaggagagtatagagctgccgtgcacttgagagatagaggtggtggaggatctggaggtggaggatctggagggggtggaagcggaggtggaggttctggagaagttcagttgttggagagtggaggtgggctcgtgcaaccaggaggatcactcaggctgtcttgtgccgcttccggtttcaccttttcttcttacgctatgtcttgggtgcgccaagcacctggaaaagggctcgagtgggtatctggtattagtggttccggcggctttacatactacgccgacagtgtcaagggcaggtttaccatctccagagacaactcaaaaaacaccctgtatctgcagatgaatagtttgagggcggaggacacagcagtgtactactgcgcaaagccaccgcgcggatacaactacggccccttcgactattggggacagggaactctcgtgacagtgtcatcagcttctactaagggaccctcagtcttcccccttgcgccttgctcaagatccacctcagagtcaacagccgcactggggtgtttggttaaagactacttccccgagcccgttaccgtgagctggaacagcggtgccttgacaagtggggtgcacacatttcccgctgttctgcagtcctcagggttgtattcactgagttctgtggtcactgtgccttcatcatctctcggcactaagacatacacttgtaacgttgatcacaaaccctctaatacaaaagttgacaaaagggtcgaaagcaagtatggacctccttgtcctccctgtccagctccagagtttctgggcgggccatctgtttttctgtttccccccaaacctaaggacacccttatgattagcaggacccctgaggtcacgtgcgtagtggtggatgtatctcaggaagacccggaggtgcaatttaactggtatgtggatggggtagaggtgcacaacgccaagacgaagcccagagaggagcagttcaactctacttatcgcgtggtgagcgtgctgaccgtcttgcatcaggattggctgaatgggaaggagtacaaatgtaaagtgtccaacaagggcctgccatcctccatagagaaaacaatcagcaaggcaaaaggccagccaagggagccccaagtttataccctgcctccatcacaggaggagatgacaaagaaccaagtctccctgacctgtctggttaaaggtttctacccaagtgacatcgctgtggagtgggaatctaatggacagccagagaataattacaagacgacacccccggtgttggactcagatggaagcttttttctctacagccggctgacggtcgataaaagtcgctggcaggagggcaacgtgtttagttgctctgtaatgcacgaagcattgcacaatcactacacccagaagagtctgtctttgtcattgggtgctggaggaggagggagtggaggaggtgggtcaggaggtggtggttcaggcggcggaggaagtggagctccactgaaaatccaggcctattttaatgagacggcagacctgccatgtcaatttgcaaattcccagaacttctctctctccgagctggtggtgttctggcaggatcaagagaatttggtcctgaacgaggtgtatctcggaaaggagaaatttgactctgtgcattccaagtacatgggtaggaccagctttgatagcgattcctggaccctgcgcctgcacaaccttcagataaaggacaagggactgtatcagtgcatcatcattcataagaagcccacaggcatgattcggatccatcagatgaattcagaattgtccgtgctg

SEQ ID NO: 1186 - DNA, 1980 bp, synthetic construct
  misc_feature 1..1980: note = LAG3 97-156-sugemalimab antibody heavy chain -CD86 IgV-Q25F/H90V polynucleotide
  source 1..1980: mol_type = other DNA
aggcgatatacagtgttgtcagttggcccagggggactcagatctgggcgcctgccattgcagccccgcgttcagctggatgagcgaggccgccaaagaggcgacttctccttgtggttgcgcccagcccgacgcgccgacgccggcgaatacagagccgctgttcacctgagggacaggggtgggggcggcagcggaggaggaggatcagggggtggaggaagtggcggaggcggcagcggggaggtccaactcctggaatccggtgggggtcttgttcagcctggcggctctcttcgactgtcatgtgccgcttcaggctttaccttctcatcatatgctatgtcttgggtccggcaggctcctggcaaagggctggagtgggtttccgggatcagtggttcaggaggcttcacctattacgcggatagcgtgaaaggaagatttactatttcacgggacaatagcaaaaacaccctttatctgcagatgaatagccttcgggctgaggatactgcggtatactactgtgccaagcctccccgcggatataattacggtcctttcgactattgggggcagggtacgctggttacagtcagcagtgcttcaacaaagggccctagcgtgttccccctggccccatgctctaggtccaccagtgaaagcaccgctgcactgggctgtctggtgaaggattattttcctgagccagttaccgtctcctggaattccggtgcccttacttcaggcgtacacacattcccggccgtgctccagagctcaggattgtacagcctcagctcagtcgtgactgtgccctcctcaagcctcggcactaagacttacacatgcaatgtggaccacaagccgtctaatactaaggttgataaaagggtggaatctaagtatgggccaccctgccctccttgtcccgctcccgagttcctgggcggcccttccgttttcctgtttcctcctaagccaaaagatacgctgatgatcagccgcaccccagaggttacttgcgtcgtggtggacgtgagccaggaggatccggaagtgcagttcaattggtacgttgacggggtggaagtgcataacgcgaaaaccaaaccgcgggaggaacagtttaatagtacctatagggtggtctcagttctcaccgtgctccaccaggattggcttaacgggaaagagtacaaatgcaaagtgtctaacaaaggcctgccaagctccatagagaagacaatctctaaagctaaggggcagcctcgcgagccgcaggtttacacgcttcctccctctcaggaagaaatgactaaaaaccaagtttctttgacatgcctggtaaagggtttctatccctcagacatagctgtcgaatgggaaagcaacggacagccagaaaataattataagaccacacccccagtgctggatagcgatggttcattcttcctttattcacggctgacggtcgataagtcaaggtggcaggagggcaatgtgttttcctgcagcgtgatgcatgaggcactgcacaatcactacacccaaaagtctctgtctctgtccctgggcgccggcggcggcggctctggcggcggcggaagtggggggggcggctccggggggggcggtagcggtgcccctctgaagattcaggcatacttcaacgagactgcggacctcccctgtcagtttgctaacagtcagaactttagcctgtctgagcttgtggttttctggcaggaccaggagaatcttgtgctcaacgaggtttatctcggtaaggaaaaattcgactctgttcatagcaagtacatggggagaacttcattcgacagtgattcctggactctcaggctccataacttgcagatcaaggataaaggcctgtatcagtgcatcatagtgcacaaaaagccaacaggcatgatccggattcatcaaatgaactcagaattgtctgtcctg

SEQ ID NO: 1187 - DNA, 1980 bp, synthetic construct
  misc_feature 1..1980: note = LAG3 97-156-sugemalimab antibody heavy chain -CD86 IgV polynucleotide
  source 1..1980: mol_type = other DNA
cgaagatacacagttttgagcgtaggcccgggtggtctgagatcaggccggttgccactccagcctagggttcagttggatgaacgggggagacaaaggggggatttctccctgtggctccggcctgcgaggcgagcagacgctggtgaataccgagctgctgtgcatctgagggatcggggggggggcggttctggcgggggtgggtctggtggggggggctcagggggcggggggagtggagaagtgcaactgctggaatccggcgggggtttggtccagccgggtgggagtttgaggctgtcctgtgcagcctccggtttcacctttagttcatacgccatgtcctgggtccgacaggctccaggaaagggccttgagtgggtttccggcatcagcgggtctggggggttcacctactacgccgattcagttaagggacgctttacaatcagtagggacaattcaaagaacaccctgtacctccaaatgaacagtttgagagctgaggacaccgccgtttactactgtgctaaacctccaagaggctataactacggacccttcgactattggggtcaaggcaccctggttactgtgtcaagtgcctctacaaagggaccaagcgtgttccccctggctccttgttctcgcagtaccagcgagtccaccgcagctttgggatgtcttgttaaagattatttccccgagccagtcacggttagttggaattccggagcgcttacctctggagtgcatactttcccagccgtgctgcagtccagcggcctttatagtttgagtagcgtcgtaactgtacccagttctagtctgggaaccaagacctacacctgcaacgtggatcacaagcccagtaatacgaaagttgataagagggtcgagagcaagtacgggccaccttgcccaccgtgtcctgcgcctgagtttttgggagggccttcagtatttctgtttcctcccaagcctaaggacacacttatgattagtcgcacacctgaggttacatgcgtcgtggtcgatgtaagtcaagaggatcccgaggtccagttcaactggtacgtagacggcgtggaagtccacaatgccaagaccaaacctagggaagaacaattcaattccacataccgggtagtcagtgtcctgactgtcctgcaccaggactggctgaacggaaaggaatataagtgcaaggtaagtaacaagggcctgcctagcagcatcgagaaaaccatcagcaaagcgaagggtcagcctcgggaaccccaggtgtacacgctgccacccagccaagaagaaatgaccaagaatcaggtcagtctgacttgtctggttaaaggcttctaccctagtgatatcgctgttgaatgggagtctaatggacagcccgagaataattataagacaacaccccccgtgctcgactcagacggttctttttttctttatagtagactgactgttgacaaaagccgctggcaggaaggcaacgtgttcagctgctctgtgatgcacgaggcattgcacaaccactacacccagaaaagtctcagcctgagcctgggtgcaggagggggtggctcaggcggagggggttcaggcggcggcggctccggcgggggcgggtcaggcgcccctctcaagatccaggcctactttaacgagaccgccgacttgccctgccagttcgccaacagccaaaatcaatcactgtccgaattggtcgtcttctggcaggaccaggaaaatctcgtgcttaatgaggtgtacctcggtaaggaaaagttcgactccgtgcattctaaatatatgggccgaactagtttcgattcagattcctggaccttgcgccttcataatttgcaaattaaggacaagggactgtaccagtgcatcatacaccataagaagccaaccgggatgatacgcattcatcagatgaacagcgaactgtctgtgctg

SEQ ID NO: 1188 - DNA, 1980 bp, synthetic construct
  misc_feature 1..1980: note = LAG3 R97E 97-156-sugemalimab antibody heavy chain -CD86 IgV-Q25I/F33L/H90I polynucleotide
  source 1..1980: mol_type = other DNA
gagagatatacagttctttcagttggtccaggcggtttgagatctggtaggctgcctctgcagcctagagttcaattggacgagagagggagacagagaggcgatttttctctgtggttgcggcccgctagaagagctgacgcaggtgaatatagggcagccgtgcatctgagggataggggaggaggaggtagcggtggaggaggttctggaggtggaggaagcggaggaggaggttctggcgaggtgcagctgctcgaatctggcggcggtttggtacaacctggaggtagcctgaggctgtcttgcgcggcatccggatttactttcagcagctacgctatgagttgggttaggcaggcaccaggcaaaggcctggagtgggtgtcagggatttcaggaagtggagggtttacctattacgcagactccgtgaagggaaggttcacaatttcccgcgataattccaaaaacaccctgtacctgcagatgaacagccttcgcgcagaggacacagcagtctactattgcgccaagcctcctcgggggtataactacgggccctttgattattgggggcaggggaccctggtgactgttagtagtgcaagcaccaagggaccatcagtctttcccttggctccctgctccagatctacatccgagtcaaccgcggcactgggatgccttgtgaaagattactttccagagcccgttaccgtgagttggaactctggggcactgacctcaggggtgcacacctttcctgctgtgctccagtcaagcggcctgtactctctgtcaagtgttgtaaccgtgccctcttcctcactgggcaccaaaacttacacctgcaatgtagatcacaagccctccaacacgaaggtggataagagggtggagagcaagtatggacctccttgtccaccatgcccagctcctgaattcctcggaggcccctcagtcttcctcttcccacctaagcccaaggatactctgatgattagccgcaccccagaggttacctgcgtcgtggtggacgtttcccaggaggatcccgaggttcagtttaattggtatgtcgatggcgtggaagtccacaatgccaaaaccaagccaagggaggaacagtttaactcaacctaccgagtggtaagcgtgttgacagttctgcaccaggactggctgaatggtaaggaatataagtgcaaagtctctaacaagggactcccctcctctatcgagaagactatttctaaagctaagggtcaacccagggaaccccaagtctacactctgcctccctcccaggaggaaatgactaaaaaccaagtcagccttacatgcctggtgaaaggattctacccatctgatattgcagtggaatgggaaagcaatgggcagcccgaaaataactacaaaactacacctcccgtgctggactccgacggctcttttttcttgtatagcaggctcacggtagacaagtctagatggcaagagggaaacgtcttctcttgtagcgtaatgcatgaagcactgcataatcactacacgcagaaaagtctgtcattgtcacttggagcaggaggtggtggttccggaggaggagggtcaggaggaggaggttcaggtgggggtggttctggagccccactgaaaatccaggcctatttcaatgagacagccgaccttccttgccagttcgcgaactcacagaacatctcactctctgagctggtcgttctgtggcaggatcaggagaatctcgtacttaacgaagtgtatctcggaaaagagaaattcgactcagttcactcaaaatatatgggccggacctcctttgattccgatagctggacgctcagactgcacaacctccagatcaaagacaaagggctttaccagtgcataatcatccataaaaagccaacaggtatgataaggatccaccagatgaatagcgagctgtccgtcctc

SEQ ID NO: 1189 - DNA, 1980 bp, synthetic construct
  misc_feature 1..1980: note = LAG3 R97E 97-156-sugemalimab antibody heavy chain -CD86 IgV-Q25V/F33L/H90I polynucleotide
  source 1..1980: mol_type = other DNA
gaaagatatactgtcctgtctgttggccccgggggattgaggtctggacgacttccattgcagccccgggtgcagctggatgaaagaggcagacagaggggagattttagcctgtggcttagacctgcaaggagagctgacgccggagagtacagggctgctgtccatctgagagataggggaggaggaggatcaggaggaggaggtagtggtgggggtggatctggaggtggcggatctggagaggttcagctgctcgagtctggtgggggacttgtacagcctggcgggtcacttcggctcagctgtgcagcttcaggctttaccttttctagttatgccatgtcttgggtgagacaggccccaggcaaaggattggagtgggtgtctgggatttcaggatcaggcgggttcacatactatgctgattctgtaaaaggcagattcaccatctcacgcgacaattccaagaatactctgtacttgcaaatgaattccttgagggccgaagataccgctgtttattattgtgctaagcctcctaggggttataactacgggccctttgattattgggggcaggggacccttgtgacagtgtcatctgcatccaccaaaggccctagcgtttttccactggccccgtgttctcgctctaccagcgaatccaccgcagcattgggatgtttggtgaaggattattttcctgagcctgtcacggtgtcttggaattcaggcgccctgacttcaggggtgcataccttcccagccgtgctccaaagctccggtctttacagcctgtctagcgtggtcaccgtgcctagctcaagcctcggcactaaaacctacacatgcaacgtagatcataaacccagtaatacgaaggtcgacaaacgggtcgaaagcaagtatggtccaccatgcccaccatgtcccgctcctgaatttttgggaggcccatctgtgttcctcttccctccaaaacccaaagacaccctgatgatttcccggacccccgaggttacatgtgttgttgtcgacgtctcacaagaggatcccgaggtgcagttcaactggtatgtcgacggtgtggaagtgcacaacgcaaagactaaacctagagaagaacagtttaactccacatacagagttgtcagtgttctcacagtcctgcaccaggactggctgaacggcaaggagtacaagtgtaaggtatccaataaggggctgcctagctctattgaaaagaccatttcaaaggctaagggtcaacccagagaaccacaggtgtatactcttcccccatcacaagaagaaatgacgaagaatcaagtctccctgacctgcctggtaaaaggattttacccctctgatatcgcagttgaatgggagtcaaatgggcagcctgaaaataactataagactaccccaccagttctggacagcgatgggtccttcttcctgtactctcggctgacagtggacaaaagcaggtggcaggaggggaacgtgttttcctgttccgtcatgcatgaagctctccacaatcactacacgcagaaatcactgtctttgtcacttggagcaggaggaggaggttctggaggtggaggatctggaggaggaggatcagggggtggaggatcaggagccccattgaagatccaggcctacttcaacgagacagccgatctgccctgtcagttcgccaattctcagaatgtgagcctgtccgaactggtggttctctggcaggaccaagagaacctcgttctgaatgaagtgtacctcggaaaagaaaagttcgatagcgtacattccaagtatatgggccgcacctctttcgactctgattcctggacgctgcggctgcataaccttcagataaaagataaggggctctaccagtgcatcatcatacataagaaacctaccgggatgatacgcatccatcagatgaattcagagttgtccgttctg

SEQ ID NO: 1190 - DNA, 1980 bp, synthetic construct
  misc_feature 1..1980: note = LAG3 R97E 97-156-sugemalimab antibody heavy chain -CD86 IgV-Q25I/F33V/H90I polynucleotide
  source 1..1980: mol_type = other DNA
gagcgatataccgtactgagtgtgggacccggaggattgagaagtggcaggctgcctctccaaccacgagtgcagctcgatgagaggggcaggcagagaggcgacttctctctgtggctgagacccgcaaggagagctgatgctggcgaataccgcgctgctgtgcacctcagagatcgaggaggtggaggatcaggaggaggaggatctgggggaggtggatctgggggaggaggttcaggggaggtccaactgcttgagagtggcggtggcttggttcagccaggaggctcactgcgcctgtcttgcgctgctagtggattcacattcagctcctacgctatgtcctgggtgaggcaggcccctggaaaagggcttgaatgggtctctggtattagcgggtctggtggattcacatactacgcggattctgtgaaaggtcgctttactatttctagagacaattctaagaacaccctgtacctgcagatgaatagtctgagagccgaagatacagcagtgtattactgtgcgaaacccccccgcggctataactatggccccttcgactactgggggcagggaacactggtcacagttagttctgcctctaccaaagggccttccgtgtttcccctggccccttgttctagatcaacttctgaaagtactgcagctctgggttgtctggtgaaggattacttccctgagccagtaactgtttcttggaacagcggtgccctgactagcggggtccatacatttcccgctgtgctccaatcctcaggactgtatagcctgagcagcgtggtgaccgttccttcatctagccttggcaccaagacttacacttgcaacgtggaccataaaccatctaatactaaagttgataagagagtggaatccaagtacggtcctccttgccctccatgtccagcccctgagtttctggggggcccttcagtgttcctgttcccgcctaagccaaaggacaccctgatgatctcaaggactcccgaggtaacctgtgttgtcgtggacgtgtcacaggaagatcccgaagtgcagttcaactggtacgttgatggcgtggaggtccacaatgctaaaactaaaccacgcgaggaacagtttaatagtacatacagggtagtgagcgtcctcaccgtcctgcaccaagactggttgaacgggaaggagtataaatgcaaagtgtctaacaagggactgccaagctccattgagaagacaatcagcaaggctaagggccaaccccgcgagccacaagtctatacactgcccccttcccaggaggagatgaccaaaaaccaagtctccctgacttgtcttgtaaaaggattctatccttcagacattgccgttgagtgggaaagcaacggtcagcccgaaaataattacaagaccaccccgccagtgctcgatagcgacggttctttttttctgtattctaggcttaccgtcgacaaatccagatggcaggaaggaaacgttttcagttgttctgtcatgcacgaagcgttgcacaatcattatacccagaagtccctgagtctctcactcggtgcaggtggaggtggatcaggaggtggcggttctggtggagggggaagcggtggaggaggatctggagctccactcaagattcaggcttattttaacgaaaccgctgacctgccatgtcagtttgcaaacagccaaaatattagcttgagcgagctcgttgtggtctggcaggaccaggagaaccttgtgctcaatgaggtttacttgggaaaggaaaagttcgattctgtgcacagtaagtatatgggaagaacttcctttgactctgacagctggacgttgagactgcacaatctgcagatcaaggacaagggcctgtaccagtgtattatcatccacaaaaagccgactgggatgatccggatccaccagatgaactccgaactctccgtcctg

SEQ ID NO: 1191 - DNA, 1980 bp, synthetic construct
  misc_feature 1..1980: note = LAG3 R97E 97-156-sugemalimab antibody heavy chain -CD86 IgV-Q25V/F33V/H90I polynucleotide
  source 1..1980: mol_type = other DNA
gaaagatatacagttctcagtgtcggccctggaggcttgagaagcggcagactgcctttgcagccaagagtccaattggacgagagggggaggcagagaggggatttttcattgtggctgagaccagctagaagggcagacgcaggcgagtatcgggcagcagtgcatttgagagatagaggcggaggaggatctggaggtgggggaagtggtggtggtggttctgggggtggtggcagtggtgaggttcagcttctggagtccggtgggggacttgtccagccaggaggttctctgagactgagctgcgcggcgtcaggattcacttttagttcttacgctatgagctgggtgagacaggcaccaggcaaaggtttggagtgggtgtccggcattagtggatccgggggctttacctattacgcagactccgtcaaagggagattcacaatatcaagagataatagcaagaataccctctatcttcaaatgaactctcttagagccgaggacacagcagtttactattgcgccaaacctcccagaggatataattatggccctttcgactattgggggcagggtacactggtaaccgtgagcagcgcttctacaaagggcccttctgtgttcccactggccccatgtagtcgctctacatcagagagtaccgcagctctcggctgcctggttaaagattactttccggagccggtgaccgtgtcttggaatagcggagctctcacaagtggggtgcatacatttccagctgtcctgcagagctcaggcttgtactctctgtccagtgtagtaactgtgccttcctcatctctgggcacgaagacatacacatgcaacgtggaccacaaaccaagtaacaccaaggtggacaagcgggtcgagtcaaagtatggcccaccatgccctccttgtcctgctccagagtttttggggggtccctctgtgttcctctttccaccaaagccgaaggatactctcatgatcagcagaacgcccgaggtaacctgcgttgtcgttgacgtctcacaggaagaccccgaggtgcagttcaactggtatgtcgacggagtcgaggtgcataatgccaaaaccaaaccacgggaggaacagtttaatagtacctaccgcgtggtaagcgtgctgacagtgctgcatcaggactggcttaacggcaaagagtataagtgcaaggtgtcaaacaagggcctgccttcaagcattgagaagaccatctctaaagcaaaaggacagcccagagagccacaggtctatactctgcctccctcacaggaggagatgacgaagaatcaggtgagcctgacttgcctcgttaaggggttttatcctagcgatatcgctgtggagtgggaaagcaacggacaacccgagaacaattataaaaccacccccccagtgctggactctgatggatccttttttctgtatagtcgccttactgttgataaaagcaggtggcaggaggggaacgtgttttcttgttccgtgatgcacgaagctctgcacaatcattacacccaaaaatccctttcactgagtcttggagctggagggggtggttcaggtggaggaggatcaggaggaggtggatctggaggaggaggttccggggctcctctcaaaattcaggcctactttaatgagaccgccgatttgccctgtcagttcgcgaattctcagaacgtttccttgtccgagttggtggtggtttggcaggatcaagaaaatttggttctgaatgaagtgtatctggggaaagagaaatttgattccgtgcatagcaagtatatggggaggaccagcttcgatagtgactcctggaccctgcgcctgcataatttgcagatcaaggataaagggctgtatcagtgtataattatccataagaagccaactggcatgattagaatccatcagatgaattcagaactgtccgttctt

SEQ ID NO: 1192 - DNA, 1980 bp, synthetic construct
  misc_feature 1..1980: note = LAG3 R97E 97-156-sugemalimab antibody heavy chain -CD86 IgV-Q25I/F33L/H90V polynucleotide
  source 1..1980: mol_type = other DNA
gaaagatatactgtgctttccgtgggccctggtggactcagaagcggtaggcttccactccagcccagagtgcagcttgacgagcgaggcagacagagaggggacttttctctgtggctcagacccgccagaagagccgatgccggtgagtatagggccgcagtacacttgcgagataggggtggagggggatcaggtggtggtggttcaggaggtggaggaagtggtggaggaggttccggggaggtgcagcttcttgaaagtggaggcggcttggtacagccaggcggatcactgaggctgagctgtgctgctagcggatttactttctcaagttatgccatgtcttgggttcgccaagctccaggcaaaggtctcgaatgggtgtctggtatctctggaagtgggggcttcacgtattatgccgattccgttaaaggcagatttacaatcagccgcgataactcaaagaacaccctgtatctgcagatgaattctctgcgagctgaggatactgctgtgtattactgcgccaaacccccccgggggtacaattatggaccttttgattactggggacagggtacgcttgtgaccgtgtcttctgcatctacaaaaggaccaagtgtgttccccctggctccctgctctaggagtacatctgagagcaccgccgccctgggatgtctggtaaaggactattttcctgaaccggtgaccgtatcttggaattccggagccctcaccagtggcgtgcataccttccccgctgtgctgcagtcctccggactgtattccctgagttcagtcgtgacagtgccttcatcctcacttggcacaaagacctatacctgcaatgtcgatcataagcctagcaacactaaagtggacaagagagtggaatcaaagtatggtccaccatgtccaccgtgcccagctcctgaattcctcggtggtccatcagttttcctgttccctccaaaacctaaggataccctgatgatcagcagaacccccgaagtcacctgcgtggtagtggacgtgtctcaggaggatcccgaggtgcagtttaactggtacgtcgatggtgtcgaagtgcacaacgcaaagacaaagcctagagaggaacagttcaattcaacctacagggtggtgagcgtgctgactgtcctgcaccaagactggctcaatgggaaagaatacaaatgcaaagtgagtaacaagggtctgccatcatccatcgaaaagaccatctccaaagccaaaggccaacctagagagcctcaagtgtatacccttccgcccagccaagaagaaatgaccaagaaccaggtgtctctcacatgccttgtgaagggcttctacccctccgacatcgccgtcgaatgggaatctaatgggcagcccgagaataactacaagaccacacctcccgtcctggacagcgatggctcttttttcttgtattcccggctgacggtcgacaagagtcggtggcaagaagggaatgttttttcctgcagcgttatgcacgaggccctccataatcattacactcagaaatcactgagtctgtctcttggtgctggtggtggcggttctggtggaggtggttcaggaggtggcggttctggaggtggaggatccggagcacctctgaaaattcaggcctatttcaacgagaccgcagatctgccttgccagtttgctaacagccagaatatcagtctctcagaactcgtggtcctttggcaggaccaagagaatttggtgttgaatgaagtctatttggggaaggagaagttcgactctgttcacagcaaatacatgggccgaacctcatttgacagcgattcctggacactgcggctgcacaacctccaaattaaagataaggggctgtatcagtgtatcattgtgcataagaaaccaaccggcatgattcgaatccaccagatgaactctgagctcagcgtactg

SEQ ID NO: 1193 - DNA, 1980 bp, synthetic construct
  misc_feature 1..1980: note = LAG3 R97E 97-156-sugemalimab antibody heavy chain -CD86 IgV-Q25V/F33L/H90V polynucleotide
  source 1..1980: mol_type = other DNA
gagagatacactgtattgagcgtcggcccaggaggtcttagatcaggaagactgccgctgcagccacgggtacagctggatgagaggggcaggcagagaggcgatttttctctgtggttgcgacccgcgagaagggccgatgctggagaatacagagctgccgttcatctgagagatagggggggaggaggaagcggaggtggaggatcaggaggaggaggaagcggaggtggagggtctggagaagtccagctcctcgaaagtgggggaggactcgttcagccagggggaagtctcaggttgagctgtgcggcctccggatttactttcagcagttacgctatgtcctgggtacggcaggcgccaggtaaagggctcgaatgggtttccgggatcagcggcagtggcggattcacttactacgcagactctgtcaagggtaggtttactatctcaagggacaattctaaaaacaccctgtatctgcagatgaactctttgcgcgcggaagacactgcggtatactattgcgctaagcctccccggggctataactacgggcctttcgactattggggacagggaaccctggtgacagtgtctagtgcatccactaagggcccatccgtcttccctctggcaccatgcagcagatcaacctcagagtctacagcagctctgggatgtctggttaaggactacttccccgagcccgtgacggtgtcatggaactcaggcgctctcacttcaggagtgcacacattccctgccgtgttgcagtcatcaggcctttatagcctgtctagcgttgtgactgttccctccagctctcttggtactaagacctatacctgcaacgttgaccataagccgtccaacaccaaggttgacaagcgcgtggagtctaaatatggacccccgtgtccaccttgtcctgcccctgagttcctcggtggtccaagtgtgtttcttttcccccctaagccgaaagataccctcatgatctcacgcacgccagaggtcacctgtgttgtcgtcgatgtctctcaggaggacccagaggttcaattcaactggtatgtggacggtgtggaggttcacaatgccaaaacgaaacctagggaggagcagtttaattccacctacagggttgtgagcgtgctgaccgtcctgcatcaggattggctgaatgggaaagaatacaaatgcaaggtgtccaataaggggctcccttcctctattgagaaaacaatctcaaaagctaagggacaacctagggagccacaggtctacaccctgcccccaagccaggaagagatgaccaagaatcaggttagcttgacttgcttggtgaaaggcttttatccaagcgatattgcggtggagtgggaatccaatggacagcccgagaacaactataaaaccacccctcccgtgctcgatagtgatggctccttctttctgtacagccgcctgacagtagataaatctcgatggcaggaagggaatgtgttctcatgctctgttatgcatgaggcactccacaaccattacacccagaagagcttgagtttgagcctcggagcaggaggtggaggaagtggtggaggaggatcaggaggtggaggttctggaggcgggggaagtggagctccacttaaaatccaagcctacttcaacgagacagccgatctgccctgtcagttcgccaacagccaaaatgtttctctgagtgagctggtcgtgctgtggcaagatcaggagaaccttgtgctgaatgaggtgtacctgggcaaggaaaagtttgactccgtgcacagtaagtacatgggccgcacatccttcgactccgactcttggacccttaggctgcataatctgcagatcaaggacaagggattgtaccaatgtataatagtccacaaaaagccaaccggcatgattagaatccaccagatgaatagcgagctgagtgtgctt

SEQ ID NO: 1194 - DNA, 1980 bp, synthetic construct
  misc_feature 1..1980: note = LAG3 R97E 97-156-sugemalimab antibody heavy chain -CD86 IgV-Q25I/F33V/H90V polynucleotide
  source 1..1980: mol_type = other DNA
gaaagatatacggtgcttagcgttggacctggcggcctgagaagtggccgcttgcctcttcagccacgcgtgcagttggacgagaggggccggcagcggggagattttagcttgtggcttcgaccagccagaagggccgacgctggcgaatatagagcggctgtccacctgcgggaccgcggtggaggcggaagcgggggaggaggtagcggagggggggggtccggcggcggcggctctggagaggtccaactcctcgaaagcggcggggggctggtccaaccaggaggttctctgcggttgagttgtgccgccagcggatttaccttttcttcatatgccatgtcttgggttcggcaggccccaggaaagggtctggaatgggtcagtgggatctccggctcaggtggttttacatattacgcggattccgttaagggaagatttacaattagcagagataactccaagaacacactttatctgcagatgaacagtctccgcgccgaggataccgctgtttactactgtgccaaaccaccacgagggtacaattatggaccattcgactactggggacaagggaccctcgtgactgtctctagtgccagcaccaagggaccaagtgtgttcccgcttgcaccatgctctagaagcaccagtgagagcacagctgcgctgggttgcctggtgaaggactacttccctgagccagtgaccgtgagttggaactcaggggctttgacctctggcgtccacacatttcctgccgtgcttcaaagcagtggactctatagtctgtcctcagtggtcaccgtcccaagcagcagtctcggaactaagacctatacctgcaatgttgatcataagccatccaataccaaggtggataagagagtagaatccaagtacggccccccttgtccgccctgtccagctcccgaattccttggagggcccagcgtgttcctgtttcctcctaaaccaaaagataccctgatgattagcagaacacccgaagtgacatgcgtggtagttgacgtcagtcaggaggaccccgaggtgcagtttaattggtatgttgacggcgtcgaggtccataacgccaagaccaagcctagagaggaacaattcaactccacatacagagttgtgtctgtcctgaccgtactgcatcaggactggctgaatgggaaggaatataagtgtaaagtttctaataaggggcttccatcctccatcgagaaaacaatcagcaaagctaaaggtcagccgagagaacctcaagtgtacacactgccaccatcccaggaggaaatgaccaagaatcaagtgagcctgacctgcctcgtgaaaggcttttaccccagcgacatagcggtggaatgggaatccaacgggcagcctgagaacaactacaaaaccacacccccagttctggactctgacggtagtttttttctgtactcaaggctcacagtggacaagtccaggtggcaggagggcaatgtcttctcttgctctgtcatgcatgaggcccttcacaatcattacacccaaaagagcctgtcactgagcctcggcgccggcgggggcggatccggaggcggggggagcggtggaggagggagcggcggtggcggcagcggggccccactgaaaatacaggcatactttaatgagactgctgatctcccatgccaatttgctaactctcagaatattagtctgtctgaactggtagtggtctggcaggaccaagaaaatttggttttgaacgaggtgtacctgggtaaggaaaaattcgattccgtacactccaagtatatgggccgaactagctttgatagtgattcctggacgcttcgcctgcacaacctgcagattaaggacaaggggctgtaccagtgcattatcgtgcacaaaaaaccaactggcatgatccggatccaccagatgaattccgaactgtcagtgctg

SEQ ID NO: 1195 - DNA, 1980 bp, synthetic construct
  misc_feature 1..1980: note = LAG3 R97E 97-156-sugemalimab antibody heavy chain -CD86 IgV-Q25V/F33V/H90V polynucleotide
  source 1..1980: mol_type = other DNA
gaaaggtatactgtattgtctgtgggacccggaggtttgaggtctggaagactccccctccagcccagggtccagctggatgaacgcggtaggcagcggggagatttttccctttggctgagacctgctcgccgagccgacgcaggggagtatagagcagctgtccacctgagggaccgcggcggaggaggcagcggtggcggtggcagtggcggcggcggcagtggaggtggcggatccggggaggttcagttgcttgaatccgggggcgggctggtgcagccaggcgggtccctgagactgagctgtgccgcttccggctttactttttcaagctatgctatgagctgggtcagacaggcacccgggaagggcctggagtgggtgtctggtatttctggctctggcggctttacctattatgccgacagcgttaaaggaaggttcaccatcagcagggataactctaagaataccctgtaccttcagatgaattccctcagggcagaggacaccgcagtatactactgtgccaaaccaccgcgaggttataactatggaccattcgactattggggacagggaaccctcgtaaccgtctcttccgcatcaaccaaaggacccagtgtgttcccactcgctccctgtagccgctccactagcgagtcaactgccgcacttggctgtttggttaaagactacttccccgagcccgtaacagtcagctggaattccggggcactgaccagtggcgtgcatacattcccggccgtgctgcagtctagcgggctgtactctttgagcagcgtggttaccgtgccgagctcatctttgggcacaaagacctatacttgcaatgtggaccataagccctctaatactaaagtggataaacgcgttgagagcaagtacggaccgccctgccctccatgcccggccccagagtttctcgggggacccagtgtgtttctgtttccccccaaaccaaaagatacactgatgatcagtaggacaccagaagtgacttgcgtggtcgtggacgtctcccaggaggacccggaggtgcagtttaactggtacgtcgacggcgtggaggtccacaatgcaaaaactaagccccgcgaggaacagttcaatagtacctatcgcgtggtctccgtcttgacagtgctgcatcaggattggctgaacggtaaagagtacaaatgtaaggtgtccaacaagggcctcccctcttcaatcgagaagactataagcaaagcaaagggacaaccacgggaaccccaggtgtacactttgcccccgtcacaggaggaaatgacaaagaatcaggtttccctgacatgtctggtgaagggattttacccctcagacatcgccgtggaatgggagagtaatggccaacccgagaataattacaagaccactcccccggtcctcgacagcgatgggagcttttttctgtatagcagattgactgttgacaaatctaggtggcaagagggcaatgtgttctcatgtagcgtgatgcatgaagctctccataatcactacacccagaaatccctgtcacttagcctcggggctggcggtggcggttctggcgggggcggatcagggggcgggggctcagggggtggaggtagcggagcacctctgaaaatccaggcctattttaatgagaccgctgatctgccgtgccaattcgcaaacagtcagaacgtgagtctgagtgaacttgtcgtcgtctggcaggatcaggagaatctggtgctgaacgaggtgtaccttggaaaagaaaagtttgattccgtgcactccaagtatatgggtcggactagttttgactctgatagttggacattgaggctgcacaatcttcagatcaaggacaaggggctctaccagtgtatcatcgtccacaagaagcccactggcatgatccggatccaccaaatgaacagcgagctcagtgttttg

SEQ ID NO: 1196 - DNA, 1980 bp, synthetic construct
  misc_feature 1..1980: note = LAG3 R97E 97-156-sugemalimab antibody heavy chain -CD86 IgV-A13L/Q25I/F33L/H90I polynucleotide
  source 1..1980: mol_type = other DNA
gagagatacactgttctttcagtcggacctggcgggttgagatcagggagattgcccctgcagccgcgagtccagctggatgagaggggtcgccagcgaggtgacttttccctgtggctgcgcccggcccggagggccgatgccggtgaatatcgcgccgccgtccatctccgggatcgaggcggcgggggatctggcggtgggggcagcggtggcggagggagcggcggcggaggttctggagaggtgcaactcctggaaagcgggggtggcctcgtacagccaggagggagcctgagactgtcttgcgccgccagtggtttcacttttagctcctacgcaatgagctgggtgaggcaagcccctggcaagggcctggagtgggtatccggcatcagcggatccggtggattcacatactacgctgactctgtgaaaggcaggtttaccatttcccgggacaacagcaaaaatacactttatctgcagatgaactccctgcgggcagaggataccgccgtgtactactgcgccaagccgccccgggggtacaattatggaccgtttgactattggggacagggaacactggttacagtgagcagtgctagtaccaaaggacctagcgtgttcccactggccccatgcagcaggagcacctctgaaagcactgctgcactggggtgtttggtgaaggattactttccagagccggtgaccgtgtcttggaacagcggtgctctgacatcaggggtccatacgtttcctgccgtgctccaaagcagtggactttatagcctgtccagtgtggtcacagtgccgagtagctcactcggaacaaaaacttacacctgtaacgtggaccacaaaccaagtaatacaaaggtagacaaaagggtggagtccaagtacgggcctccttgccccccgtgccccgcccctgaattcctgggcggcccctccgtattcctgttccctccaaagccaaaagatactctgatgatcagcagaacccctgaagtgacctgtgtggtggtcgacgtgagccaagaggaccccgaagttcagtttaactggtatgtggatggtgtggaggtgcataatgctaaaactaagcccagagaggagcagtttaattctacttatagagtggttagcgtcctgaccgtgcttcatcaggattggctgaacgggaaggaatataagtgtaaggttagtaacaaaggactccccagctccatcgagaagacaatcagcaaggctaaaggacagccccgggagcctcaagtctataccctccctccctcacaggaagaaatgaccaaaaatcaggtcagcctcacgtgtctggtaaaaggtttttacccatccgacatcgcagttgagtgggagtctaacgggcagcccgagaacaattataagacgacaccaccagtcctggactctgatggctcattctttctttacagcagactgaccgtagacaaatctcggtggcaggaaggcaacgttttttcatgcagcgtgatgcatgaggcactgcataaccactacacacaaaaaagtctgtctttgtctcttggggctggaggcgggggtagtggcggtggcggaagcgggggcggggggagtggggggggtggttcaggtgcccccctgaaaatccaggcctatttcaacgaaaccctggatctgccatgccagtttgccaatagtcaaaacattagcctgtctgagctcgtggttctctggcaagaccaagaaaacctcgttctgaatgaagtgtacctgggtaaagaaaagttcgacagcgtgcactccaaatacatggggagaacttcatttgactccgattcatggactctccggcttcacaacctgcagatcaaggacaagggcctttaccagtgcatcattatacacaaaaagcctacagggatgatacggattcaccagatgaattctgagctcagtgtcctt

SEQ ID NO: 1197 - DNA, 1980 bp, synthetic construct
  misc_feature 1..1980: note = LAG3 R97E 97-156-sugemalimab antibody heavy chain -CD86 IgV-A13I/Q25I/F33L/H90I polynucleotide
  source 1..1980: mol_type = other DNA
gagaggtacacagtgctgtctgtaggacctggaggcttgagatcagggagacttccacttcagcctcgcgtgcaattggatgaaaggggccggcagagaggcgactttagcctgtggttgagacctgctagacgagcagacgcaggcgaatatcgcgctgccgtgcatttgagggataggggaggaggaggttcaggaggaggaggatctggcggaggaggttcaggaggaggaggcagtggcgaggttcagctgttggaatctggaggaggacttgtacagccagggggcagccttagactctcttgcgcagctagtggatttacctttagcagctatgcaatgtcatgggtgagacaagctcccgggaagggtttggaatgggtttcaggcatatctggaagcggcggctttacatattatgccgatagtgtcaaaggcaggtttaccatttcaagggataactccaagaacaccctgtatttgcagatgaacagcctgagggctgaagacacagccgtatattattgcgcaaaaccgccgcgcggatacaattacggccctttcgattactggggccagggaaccctggtaaccgtgagcagcgcctctactaagggcccatctgtgtttcccttggccccctgcagcagatcaacgagcgaaagcacagccgcactcggctgcctggtgaaagactatttccccgaacccgtaaccgtctcctggaatagcggggcattgacatctggcgtgcacacatttcccgcggtcttgcaatctagtgggctgtactccctgagctccgtggttaccgtgccaagctcctctctgggcactaaaacatatacctgcaatgttgatcacaagcctagcaacaccaaggtggacaagagagtggagtctaaatatggccccccatgtccaccttgtcctgctccagaatttctgggagggccgtctgtctttctgtttccccccaaaccgaaagatactctgatgatcagcaggacccccgaggtaacatgtgttgtcgtggatgtgtctcaagaggatccagaagtgcaattcaactggtacgtggacggggtcgaagtgcacaacgcgaagactaaaccaagagaggaacagttcaacagcacttatagggtggtttccgtcttgaccgtcctccatcaggattggctgaacggcaaggaatacaagtgtaaggtgtctaacaaaggtttgccttcttctattgaaaaaaccatcagcaaggccaagggacaaccacgagagccccaggtttacacccttcctccatcccaggaagaaatgacaaaaaaccaggtgtcattgacctgcctggtaaagggcttctatcccagcgacattgcagtggagtgggagagtaatggccagcccgagaacaattacaagacaaccccaccggttctggatagcgacggtagcttctttctctacagcaggcttacagttgataaaagcagatggcaggaagggaacgtcttcagttgttcagtgatgcacgaggccctgcacaaccactatactcagaagagtctgagcttgtcacttggagcaggaggtggaggatctggaggtggtggatccgggggaggtggatcaggtggaggaggttctggagctccactgaagatccaggcctacttcaatgagactattgatctgccctgtcagtttgcaaacagccagaacatatccctgagtgagctcgtggtgttgtggcaggatcaggaaaacttggtactgaacgaggtctatcttggcaaagagaaatttgattccgtgcattccaagtatatgggaagaacctccttcgatagcgattcttggactctgcggctccacaatctccagatcaaggataaggggctgtatcaatgcataatcatccacaagaagcctactggaatgattagaatccatcagatgaactctgaattgagcgtcctt

SEQ ID NO: 1198 - DNA, 1980 bp, synthetic construct
  misc_feature 1..1980: note = LAG3 R97E 97-156-sugemalimab antibody heavy chain -CD86 IgV-A13L/Q25V/F33L/H90I polynucleotide
  source 1..1980: mol_type = other DNA
gaacgctacacagttctgtctgtggggcctggaggattgagatctggcaggctgcctttgcaaccacgcgtccagctggatgagcggggtagacaaagaggggatttttctctttggctgagaccagctcgcagagcagatgccggtgaatatagggcagctgtgcacctgagggacagaggaggtggtggcagtggaggaggaggatcaggaggaggcggaagtggaggaggaggaagcggagaggttcaacttttggaatctggaggcggtcttgttcaaccagggggctccctgagactgagttgtgccgcaagcgggttcaccttttctagttatgctatgtcatgggttcggcaggccccaggaaaaggactggaatgggtgtcagggatttctggaagtggcggtttcacctattatgccgacagcgtcaagggtcgcttcaccattagccgagataactctaaaaatacactgtatcttcagatgaattcccttcgggctgaggacacagctgtctactactgcgccaaaccgccccggggatataattacggaccttttgactattggggccaggggaccctggttacagtgagtagtgcaagtactaaggggccctctgttttcccacttgcaccctgcagtcggtctaccagcgagtccactgcagccttgggttgcctggtgaaagactatttccctgagcctgtgacagtgtcttggaactccggcgccctcacatctggagtgcacactttccccgcggttctgcagtcctccggcttgtatagcctctctagcgtggtgaccgtacccagttcttcactcggtaccaagacatatacctgtaatgtcgatcacaaacccagcaacacgaaggtcgacaagagagtggaatcaaaatacggaccaccctgtcccccatgtcctgctcctgaattcctcggaggacccagcgtgttcctttttccgccgaagccgaaggataccctgatgatctcacggactcccgaggtgacctgtgtggtcgtggatgtatcccaggaggaccccgaggtgcaatttaactggtacgtggacggggtagaggtgcacaacgccaaaacaaaacccagggaagaacagtttaactctacctacagagtcgtgagcgtactgacggttctccaccaggactggctgaacgggaaagagtataagtgtaaggtgtcaaataagggccttccttcatctatcgagaaaaccattagtaaggccaaaggccagcctcgagagcctcaagtttacacactgcccccgtcacaagaggagatgacaaagaatcaggtgagcctgacatgcctggtcaaaggcttttatcctagcgacatcgcagttgagtgggagagcaatgggcagcccgaaaacaactataaaacaaccccacccgtattggacagcgacggcagtttttttctgtacagtcgactgactgtggataagtccagatggcaggaaggcaacgtgttctcatgttctgtgatgcatgaggcactgcataaccactacacacagaaaagcctctcattgtctttgggagctgggggaggtggatcaggaggtggtggtagtggaggtggtggctctggaggtgggggatcaggtgcaccactgaagatccaagcatacttcaatgagaccctggacctgccttgccagttcgcaaattcccaaaacgtgtctttgtccgagctggtagtgctgtggcaggatcaagagaacctggtgctgaatgaggtgtatctcggaaaggagaagttcgacagcgtccactctaagtacatgggtcgcacctccttcgacagcgactcatggaccctcagactccacaacctccaaatcaaggacaagggactgtatcagtgcattattatccacaaaaaaccgaccggcatgattcgcattcaccagatgaactcagaattgtccgtactg

SEQ ID NO: 1199 - DNA, 1980 bp, synthetic construct
  misc_feature 1..1980: note = LAG3 R97E 97-156-sugemalimab antibody heavy chain -CD86 IgV-A13I/Q25V/F33L/H90I polynucleotide
  source 1..1980: mol_type = other DNA
gaaaggtatactgtactttctgtgggacctgggggcctgagaagcggtagactccctctgcagcctcgggtccagcttgacgagagaggtcgccagagaggggatttttccctctggttgagacccgcgaggagagccgatgcaggagaatacagggcagcagttcaccttagagacagaggaggcggaggttctggaggaggaggatctggaggtggtggcagtggaggaggcggaagtggagaagtgcagctccttgaatctggaggtggattggtgcaaccaggggggtccttgcgattgtcatgtgccgcctctggcttcacttttagctcttacgctatgagctgggtgaggcaagcacctggaaagggactggagtgggtgagtgggattagcggctcaggcggttttacttactatgcagacagcgtaaagggccgcttcacaatcagccgggataattcaaagaataccctgtacctgcagatgaattctctgcgcgccgaagacaccgccgtttactactgtgcgaagccacctcgggggtacaactatggaccgtttgattactggggccagggtacccttgtaaccgtctcaagcgccagtactaaggggccatctgtgttcccactggctccctgtagcagatcaactagtgaatcaaccgccgccctgggatgcctcgtaaaggattattttcccgaacctgtgactgtttcttggaattcaggggcccttacctccggagtgcacacatttccggcagtgcttcagagctccggtctctatagtctgtccagtgtcgtcacggtgcctagctccagccttggcactaaaacatacacctgcaatgtcgaccacaagccctctaacaccaaggtagataaaagggtggagtctaagtatggcccaccatgtccaccatgtccagctcctgagttcctgggagggccttctgtttttctgttccccccaaaaccaaaagacactcttatgatttccaggaccccagaggtgacttgcgtggttgttgatgtgtcccaggaagatcccgaagtgcaattcaactggtatgtcgacggagtggaagtgcataatgccaaaaccaaaccccgcgaagaacagtttaactcaacatatcgggtcgtgtccgtgctgacggtgcttcatcaggattggctgaacgggaaagaatacaagtgcaaagtgagcaacaagggactgccaagctcaatcgaaaaaacaatcagcaaggcaaagggtcagccccgcgaacctcaggtgtatacactgcctcctagccaggaggaaatgacaaaaaaccaggtctcactcacatgcctcgtgaaaggcttctatccatctgacattgctgtggaatgggagtctaacgggcagcctgagaacaactacaaaactaccccgccagtcttggattctgatggaagcttctttttgtactcacgactgacagtcgacaaatcacgctggcaagagggtaacgtgttctcttgcagcgtcatgcatgaagctctgcataatcactatacacagaagagcctgtctttgtccctcggagctggaggaggtggaagtggaggtgggggatccggaggaggaggatctggaggaggtggttctggtgcgcctcttaagatccaagcatacttcaacgaaacaattgatctgccttgtcagtttgcaaacagccaaaatgtgtctttgtccgaattggttgtgctgtggcaggatcaggagaatctggtgctcaacgaagtttacctcggcaaagaaaaattcgactctgtgcattccaagtacatggggcgcacctcattcgacagcgatagttggacccttaggctgcacaacctccagatcaaggacaaaggcctttaccagtgtatcattatacacaaaaaacccacagggatgatcaggattcaccagatgaacagcgaactctctgtgctg

SEQ ID NO: 1200 - DNA, 1980 bp, synthetic construct
  misc_feature 1..1980: note = LAG3 R97E 97-156-sugemalimab antibody heavy chain -CD86 IgV-Q25I/F33L/I89L/H90I polynucleotide
  source 1..1980: mol_type = other DNA
gaaagatatacagtcctttcagtgggacctggcggacttcgatctggaagactccccctccagcctagagtccaactcgatgaacgcgggagacaaagaggagactttagtctttggcttaggccagctcgcagagctgacgctggagaatacagagcagcagtgcatctgagagatagaggcggaggagggtctggaggtggtggatctggaggaggcggctcaggaggtggaggatctggagaggtgcagcttctggaaagtggaggtggattggtccaaccaggaggctccttgcgacttagctgtgccgcaagtggtttcactttctctagttacgccatgagctgggtgaggcaagcccctggaaaaggccttgagtgggtgtcaggcatcagcgggagtggtgggttcacctactacgcagattctgtgaagggcaggttcacaattagcagggataattctaagaataccttgtacctccaaatgaactcattgcgggccgaggacacagccgtgtactattgtgctaagcctcctcgcgggtacaactacggtccgttcgattactggggtcagggaacactggtgaccgtcagctctgcctccacaaagggtccatccgtattccccctggccccatgttccagaagcaccagcgaaagcaccgccgctctgggttgtctggttaaagactatttccccgaaccagtgacagtgagctggaattccggagcacttacaagcggagtgcacactttccctgccgtgttgcaatctagtgggctgtactccctgagctcagtggttactgtccccagctcctccctcggtaccaaaacctacacatgtaatgtggatcacaaaccaagcaacacaaaggttgataaaagagtcgagagcaaatatggtccaccatgtcccccatgtccagcccctgagttccttgggggaccatccgttttcttgtttccccccaagcctaaggatactctgatgatatcccggactcccgaggtgacctgtgtggtcgtagacgtgagccaggaggatcccgaagtccaatttaattggtacgtcgacggggtagaagtgcacaacgccaaaaccaagccccgggaggagcagtttaatagcacctatcgcgtggtcagtgtgttgactgtcctgcatcaagattggcttaatgggaaagagtataagtgtaaagtgtctaataaggggctgccctcctcaatcgagaagacaatcagtaaggcaaaaggccaaccaagagaacctcaggtgtacacactgcctcctagtcaagaggaaatgactaagaaccaagtctctttgacgtgccttgtgaaagggttctacccaagcgacattgccgtcgaatgggaaagcaacggtcagcctgagaacaattacaaaactaccccacctgtcctggactctgacgggagcttttttttgtactcacgccttacagtggataagtccaggtggcaagaagggaacgtcttctcttgctccgtgatgcatgaggccctgcataaccattatacccagaagtctctgtcactctcccttggagcaggaggaggtggatcaggaggaggcggatcaggaggtggagggtctggaggtggaggatccggagcacctctgaagatccaggcatatttcaacgagaccgctgacctgccgtgccaattcgccaactcccagaacatatctctctctgaacttgtagtgctgtggcaagatcaggaaaaccttgttttgaacgaagtgtacctcggaaaggagaagttcgactcagtgcactccaagtatatgggtcgcaccagttttgacagtgattcttggaccttgaggctccataacctgcagattaaagataagggattgtaccagtgcattctcatacataagaagcccactggcatgatcagaatccatcagatgaactccgaactgtctgtgctc

SEQ ID NO: 1201 - DNA, 1980 bp, synthetic construct
  misc_feature 1..1980: note = LAG3 R97E 97-156-sugemalimab antibody heavy chain -CD86 IgV-Q25I/F33L/M60R/H90I polynucleotide
  source 1..1980: mol_type = other DNA
gaaagatacacggtgttgtcagtaggcccaggcggtttgagaagtgggcgactgcctctgcagccaagggtccagctggatgaaagagggcggcagagaggggacttttccttgtggcttcggcctgcaaggagagcagatgccggcgaatatagggctgctgtccacctgcgagatagaggaggaggtggttcaggaggcggaggaagtggcggcggaggatctggaggaggtggtagtggtgaggtccagctcctggaatccggtggaggactggtccagcctggaggttccctgagactgagttgcgctgcctctggctttaccttcagcagttacgcaatgagttgggtgcgccaagctccaggaaaggggctggagtgggtctctggaatctccggttcaggtgggttcacctattatgcagactcagtgaaagggaggttcactatatcccgcgataactcaaaaaacaccttgtacctgcaaatgaactccttgagagccgaggacaccgcagtgtactactgtgcaaagccgcctagagggtacaactacggaccgttcgattactggggccaggggaccctggtgacagtttcctcagcatccactaaaggccctagtgtttttcctctggctccatgctcccggtctacttctgaatcaacagctgccttgggctgtctggtgaaagactactttccagagcccgtgaccgtatcatggaactctggcgccctgacttcaggagtccacaccttcccagctgtattgcagagtagcggcctgtactctctgtcctctgttgttacggtcccaagctcatcactgggaacaaagacctacacatgcaatgtcgaccacaagccgagcaataccaaagttgacaaacgcgttgaatctaagtatggacctccctgtcctccatgtcccgctcctgaatttttgggaggacccagcgtattcctgttccctcctaaacctaaagacacattgatgatttcaagaacacctgaggttacttgtgttgtggtggacgtgagtcaggaggaccctgaggtgcagtttaattggtacgtggacggtgtggaggtgcataatgcgaaaacgaagccacgggaagagcagttcaattctacctaccgggttgtttcagtgttgaccgttctgcatcaagattggctgaacgggaaggagtataagtgcaaggtctctaacaaaggccttccctcaagcatcgaaaaaactattagtaaagcaaaaggccagccaagggagcctcaggtatacaccttgccacctagccaggaggagatgactaagaaccaggtcagcctgacttgcctcgtcaaggggttttacccttcagatatcgccgtggagtgggagtccaatggacagcctgagaacaattacaagactacaccacccgtacttgatagtgacggaagctttttcctgtactctaggcttacagtggataagagccgctggcaggaaggcaacgtgttctcctgttctgtgatgcatgaagccctgcataaccactacacccagaaaagcctctccctgtctctcggagccggtggaggaggatcaggtgggggtggttccggaggaggtggatctggaggaggcggatctggagccccactgaaaatccaggcttacttcaacgagactgccgatctgccgtgtcagttcgccaactcccagaatatttctctctcagagttggtcgttctgtggcaagaccaggaaaacttggttcttaacgaggtttatctggggaaggaaaaattcgattcagtgcactcaaagtatagaggccgaacttctttcgactcagactcttggactcttagacttcacaacctgcagatcaaggacaaagggctgtaccaatgtatcatcatacacaagaaaccaaccggcatgattaggattcatcagatgaatagcgaactgagtgtactg

SEQ ID NO: 1202 - DNA, 1980 bp, synthetic construct
  misc_feature 1..1980: note = LAG3 R97E 97-156-sugemalimab antibody heavy chain -CD86 IgV-Q25V/F33L/I89L/H90I polynucleotide
  source 1..1980: mol_type = other DNA
gaaagatacacagttctgtctgtaggcccgggtggacttaggtcaggaaggctgccactgcagccacgagtgcagctggatgagcgaggtagacaaaggggagatttctctctctggctgagacctgcacgccgagccgacgcaggagaatatagagctgcagtccatttgcgagatagaggaggaggcggatccggaggtggaggttcaggtggtggaggttcaggaggtggaggctctggcgaggtccagcttcttgagtctggagggggattggtccaacccggaggaagtctgaggctcagctgcgcagctagcggttttacgttctcttcatacgctatgtcctgggtcagacaggctcctggcaagggtcttgagtgggttagtggcatttcaggctctggaggctttacctactatgctgattcagtcaaaggacggtttacaatatctcgggacaatagcaagaacacattgtacctccaaatgaactccctgcgggctgaggataccgccgtgtactactgtgctaaaccccctagaggctataactatggtccattcgattactggggacaaggaacccttgtgacagtgtctagtgcatctacaaagggcccaagcgttttcccacttgccccctgcagcagaagtacgtctgagtccacagccgcccttggatgtctggtgaaggattactttccagaacctgttacagtcagctggaattccggcgcactgaccagtggagttcacactttcccagccgtgttgcagtcaagtggactgtattcactgtcatccgtcgtgaccgtcccttcatcctccctgggcaccaaaacttatacttgtaatgtggaccataagccgagcaataccaaggtagacaaaagggtggagagcaaatacgggcctccttgtccaccctgtccagcacctgagtttctgggaggcccaagcgtgtttctgtttcctcctaaacctaaggacactcttatgatatctcgcactcccgaggtgacctgtgtagtggtggacgtgtcccaggaggacccagaggtccaattcaattggtacgtggatggcgttgaagtgcataatgcaaaaactaaacctagagaagaacagtttaactccacctatagggtagtgtctgtgctgacagtgctgcaccaggactggctgaacggaaaagaatacaagtgtaaagtttccaataaaggactcccatcctctatcgagaagacaatatccaaagcaaaaggccagcccagagagccccaggtttacacattgccgcccagtcaggaggagatgactaagaaccaagtgagcctgacgtgtctcgtgaaagggttctacccatctgacatcgcagtggaatgggaatctaatggccagcccgaaaacaattataagaccaccccccccgttcttgacagtgatgggtccttttttctgtattcccggctgaccgtggacaagtcaagatggcaggagggcaacgtcttctcatgcagcgttatgcacgaggctttgcacaaccactatacccagaagagtttgtctctttctttgggagctggaggaggtggttctggtggaggtggatctggaggtggaggatctggtggtggtggaagcggcgcaccattgaagatacaggcctatttcaacgagacagctgacctgccttgtcaatttgcaaattcacagaacgtgtcactgtccgagctcgtagttttgtggcaggatcaggagaatttggtcctcaacgaggtatacctcggcaaggagaagtttgactcagtgcactcaaagtatatgggtagaaccagcttcgacagtgactcttggacattgaggctgcataacctgcagattaaagataagggactgtaccagtgcatcctcatccacaagaagccaaccgggatgattcgcatccatcagatgaactctgaactgtccgttctg

SEQ ID NO: 1203 - DNA, 1980 bp, synthetic construct
  misc_feature 1..1980: note = LAG3 R97E 97-156-sugemalimab antibody heavy chain -CD86 IgV-Q25V/F33L/M60R/H90I polynucleotide
  source 1..1980: mol_type = other DNA
gagagatatactgtcctctccgtcggacccggaggtttgagaagtggaagactgccactccaacccagagtccagctggacgaaaggggacggcaaaggggcgatttttccctctggctgaggcctgctaggagagcagacgctggcgagtacagagcagctgtgcatttgagagatagaggtggaggtggctcaggaggaggtggctcaggaggaggaggaagtggaggtggtggcagcggagaggtccaactcctggaatccgggggtggactcgtgcaaccaggtggaagcctcagattgagttgtgccgccagcggatttacattttctagctatgcaatgtcctgggtgcgccaggctccagggaaaggactggagtgggtgtccggcatcagtggcagcggaggattcacttactacgccgacagcgtgaagggcagattcaccattagcagagataatagcaagaacaccctgtaccttcagatgaattcactgagggccgaggacacagctgtctactattgtgcaaagccacctagaggttacaactacggtcccttcgactactggggacagggcacgttggtaacagttagtagcgcatctaccaagggacctagcgtgttcccactcgctccatgctcccggtccacttcagaaagtaccgcagcgctgggctgtctggtcaaggattatttccctgagcctgtaacggtgtcatggaacagcggtgccctgacgtctggagttcatacattcccagccgttttgcagtcatctggactctatagtctgtcctccgtagttaccgtcccttccagctccctcggcacgaagacttatacatgtaacgtcgatcataaaccaagcaacaccaaagtggacaagagagtggagtcaaaatatggacctccatgtccaccttgccctgctcctgaatttctgggaggcccctccgtgtttctgttccctcccaagcctaaagacaccctgatgattagccgaacacctgaggtgacgtgtgtcgtggtggatgtctcacaggaggacccagaggtgcagttcaattggtacgtggacggcgttgaagtgcataatgccaaaacaaagcctcgcgaagaacagttcaacagcacgtatagagtagtaagcgtgctcacggtgctgcaccaggattggcttaacggcaaggaatacaaatgtaaagtctctaataaagggctgccatcaagcatcgagaaaaccatttcaaaagctaaagggcaaccgcgcgagccacaagtgtatactctgccgccaagtcaagaggagatgactaagaaccaggtttctctcacatgcctggtgaaagggttctacccctcagacatcgctgttgagtgggagagcaatgggcaaccagagaacaactacaaaactaccccacctgtgttggacagcgatggaagcttctttttgtacagccgcttgaccgtggacaagagcagatggcaagaggggaacgtgttttcctgttccgtcatgcatgaagctttgcacaatcactacacccagaagtccctgtcattgtcactgggagcaggtgggggtggaagtggtggaggaggatctggaggaggtggatctggtggaggcggaagtggggctcctctgaagatccaggcctactttaatgagactgctgatctcccttgtcagttcgctaatagccagaatgtgagtcttagtgaattggtggtactgtggcaagatcaagaaaatctcgtcctgaatgaagtctacttggggaaggaaaagtttgacagtgtccattccaagtaccgcggcagaacatctttcgattccgactcatggaccctgagattgcataacctgcagataaaggataagggcttgtaccagtgtatcataattcacaagaagcccacgggtatgatcagaatccaccagatgaacagcgaactgtcagtcctg

SEQ ID NO: 1204 - DNA, 1980 bp, synthetic construct
  misc_feature 1..1980: note = LAG3 R97E 97-156-sugemalimab antibody heavy chain -CD86 IgV-Q25F/F33L/H90I polynucleotide
  source 1..1980: mol_type = other DNA
gagaggtataccgtcctgtcagttggaccaggaggtcttcgatctggtagactgccccttcaacctcgagttcaactggatgagagaggccgacaacgcggggacttctcactgtggttgaggccagcacggcgggctgatgctggagaatacagggccgccgtgcatctcagagatagaggaggtgggggatctggaggcggaggatctggaggaggtggctctggaggcggaggaagtggagaggtgcagctgctggaaagcggaggtggattggtccaacctgggggctccttgcgactttcttgcgccgcaagcggcttcactttctcctcttatgctatgtcatgggtacgccaggcaccaggaaaagggttggaatgggtgtctggcattagcggatccggaggcttcacctactatgccgacagcgtaaaagggcggtttaccatcagccgggacaatagcaaaaatacactgtatctccagatgaactctctgagagcagaggataccgctgtatattattgcgccaaacctccaagaggttataactacggcccgttcgactattggggccaaggcaccctcgttacggtgtcctctgctagtacgaaagggccatccgtgttccctctcgctccttgctctagaagcacatctgagagtaccgctgccctgggctgcttggtaaaagattattttcccgagccagtcaccgtgtcatggaatagtggtgctttgacaagcggagtgcacaccttcccagcagtgcttcagtcctccggcttgtattctctgtcttccgttgtcactgtccctagttctagcctggggactaagacctacacatgcaacgtcgatcacaagccttcaaataccaaggtcgacaagcgggtcgagagcaagtacggtccaccctgcccaccttgtccagcaccagagtttctggggggaccgtcagtattcctctttccacccaaacccaaggacactcttatgatatccaggacccccgaagtgacctgcgtggtcgtcgatgtgagccaggaggaccccgaagtgcagttcaactggtacgttgacggcgtcgaggttcataacgcaaagacaaagcctcgggaggaacagtttaacagtacttatcgggtggtttcagtgctgaccgtcctgcaccaggactggctgaatggcaaagagtacaaatgcaaagtgagcaataagggtctcccaagttctattgagaagacaatcagtaaagctaagggccagccgagggaaccacaggtgtacaccctgcccccctcccaagaagaaatgaccaagaaccaggtgagcctcacctgtctggtcaaggggttctacccttcagacattgccgtggagtgggaatctaacggacagcctgagaacaattacaagaccactcctcccgtgctggactctgacggttcatttttcctctacagccgcctcacagtcgataagtctcggtggcaggaagggaatgttttctcttgctcagtgatgcacgaggcgctgcacaaccactacacacaaaagtctctgtccctgtctctcggcgcaggaggaggtggtagtggcggaggaggttctggaggaggtggcagtggaggtggtggaagcggagcacctttgaagattcaagcttactttaatgaaacagccgacttgccttgccagtttgcgaattcacaaaacttcagcctttctgagctggtggtgctctggcaggaccaggagaaccttgtgctgaatgaggtgtacctgggcaaagagaagttcgattctgtacatagtaagtatatgggacggaccagttttgacagcgatagctggacactgcggctgcacaaccttcagatcaaagataagggcttgtaccagtgtataatcatccacaaaaagccgacaggcatgattagaatccaccagatgaactcagagttgtctgttctg

SEQ ID NO: 1205 - DNA, 1980 bp, synthetic construct
  misc_feature 1..1980: note = LAG3 R97E 97-156-sugemalimab antibody heavy chain -CD86 IgV-Q25I/F33L/H90F polynucleotide
  source 1..1980: mol_type = other DNA
gaacgctatactgtattgtcagtcggaccgggaggcctgagaagtggacgactcccactgcaaccacgggtacaattggacgaacgggggaggcagcggggagactttagtctctggttgaggccggcaagacgcgcagatgctggggaatatagagcagctgtgcacttgagagatagaggaggtggaggctctggaggtggtggatctggtggaggaggcagtggaggaggcggttcaggagaagtgcaacttttggagagtggaggaggattggtgcaacctggggggagcctcagacttagctgtgcggcttctgggttcacttttagcagctacgctatgagctgggttagacaggccccaggaaaagggcttgaatgggtgtcaggtatctcagggtcaggtggttttacatactacgctgattccgtcaagggcaggttcactattagtcgggataattccaaaaacacattgtatctgcagatgaactccttgagggccgaggataccgccgtgtattactgcgctaagcctcccaggggctataattacggcccctttgattattggggacagggcaccttggtgactgtgagcagcgcctccaccaaaggaccttccgtgttcccattggccccatgttctagatcaactagtgaatcaaccgctgcgctgggctgcctggttaaggactacttccctgagcccgttacggtgagctggaacagcggagctctcacgagtggcgtgcacacctttcctgctgtgctccagtcctcaggcctgtattccctgagctccgtggttaccgtgcccagctcctctctgggaaccaagacctacacatgcaacgttgatcacaagccctccaatacaaaagtcgataaacgggtggaaagcaagtacggtcctccatgtccaccgtgtcccgctcctgaattccttggcgggccgtctgtcttcttgttcccaccaaagccaaaagatacgcttatgatctctagaacacctgaggtcacctgtgtggtggtggacgtaagccaggaggatcccgaggtgcagttcaactggtatgtggatggcgttgaggtgcacaacgctaaaactaagccacgcgaggagcagttcaatagtacgtatagagtcgtcagtgtgctgaccgtacttcatcaggactggcttaatggcaaagaatataaatgtaaggtgagtaacaagggcctgccgtctagcatcgagaagaccatcagcaaggcgaaaggacagccccgggagcctcaggtatacacattgcctccctctcaggaagagatgaccaaaaaccaggtgtcccttacttgcctggttaaaggattttatccctccgacatcgcagtggaatgggaatcaaatggccagccagagaataattataagacaacacctcctgtgctcgatagcgacgggagtttctttctttactctcggctgaccgttgacaagtcacggtggcaggaggggaacgtgttctcctgctctgtgatgcatgaagccctccacaaccactatactcaaaagagcctgtccctgtcattgggagctggaggaggcggttcaggaggtggaggtagtggaggcggtggatcaggcggaggaggatctggagctcccctcaaaattcaggcctatttcaacgaaactgcggacctgccttgccagtttgccaactctcagaacatatcactgagcgagctggtggtgctgtggcaggaccaggagaatctggtgcttaacgaagtgtacctgggcaaggagaaattcgactcagtccactctaagtacatgggtaggaccagcttcgatagcgatagctggaccctgagacttcacaacctgcagattaaggacaaaggactctatcagtgtatcatattccataaaaaacccacaggaatgatacgcatacaccagatgaactctgagctctcagtcttg

SEQ ID NO: 1206 - DNA, 1980 bp, synthetic construct
  misc_feature 1..1980: note = LAG3 R97E 97-156-sugemalimab antibody heavy chain -CD86 IgV-Q25I/F33A/H90I polynucleotide
  source 1..1980: mol_type = other DNA
gaaagatatacggttctgagcgttggacccggtggtttgaggtctggacggttgcctctgcagcccagagtgcagcttgatgagagaggccggcagagaggtgacttctcactgtggttgcgccctgccagaagggctgatgccggagaatatagggccgctgtgcatcttagagataggggaggtggaggctctggtggtggaggatcaggaggaggtggttcaggtgggggaggtagtggcgaggtccaactcttggagtcaggcgggggactggtgcaacctggaggtagtttgagacttagctgcgccgctagcggctttacctttagttcatatgcaatgagctgggtccgacaggcacctggaaagggcctcgagtgggtcagtggcattagcggtagcgggggattcacctattatgccgattctgtcaaaggacgctttacaatatccagagacaactctaagaacactctgtatcttcaaatgaattccctgagagcagaggatacagccgtatactattgcgcgaagccccccagaggctacaattacggcccgtttgactattggggacagggcaccctggttactgtgagcagtgcctccactaagggtcccagcgtcttccccttggccccttgttcacggtcaacatcagaatcaaccgcagcattgggatgtctcgtgaaggactacttccccgagcccgtaactgtgtcatggaacagtggcgccctgacctctggtgtccataccttcccagccgtgctgcagtcctcaggcctctactccttgtcctctgtggttacagtgccttcaagcagtctcgggacgaaaacttacacttgcaacgttgatcacaaaccttctaatactaaggtggacaagcgggttgagagcaagtatggacctccatgtcctccttgtccagccccagagtttctggggggtccatccgtgtttctgtttcctcctaagccaaaagacacccttatgatctcaagaacaccagaagtcacgtgcgttgtggtggatgtgtcccaggaggatccggaggtgcaattcaactggtatgtggatggggtagaagtacacaacgcaaagaccaagcccagggaagagcagttcaacagcacctacagggtcgtttctgtcctgactgtgttgcaccaggactggctgaacggcaaggaatacaagtgtaaagtgagtaataaagggcttccctctagtatcgaaaagaccattagcaaagccaagggccagccaagggaaccccaggtatacaccctgcctccatctcaggaggagatgaccaagaaccaggtctccttgacctgtctcgtcaaaggcttctatccgtctgatattgccgtcgaatgggagtctaatggacaaccagaaaacaactacaagaccacgcctccagttctggatagtgacggctcattctttctgtactctcggctgaccgtagataagtcacggtggcaggaaggcaacgtcttctcctgttccgtcatgcacgaagctttgcacaaccattacactcagaagagtcttagtttgtctctgggagccggaggtggaggctcaggaggaggtggctctggaggtggaggatctggaggtggaggatcaggcgcccctctcaaaatccaggcctactttaacgagacggccgatctcccatgccagttcgccaactcacagaacatttctcttagtgagctggtggtggcctggcaagatcaagagaatctggtgctgaatgaagtctatctgggaaaagagaaatttgacagcgtgcacagcaagtatatggggcggacgtctttcgatagcgactcttggaccctgagactccacaacttgcaaatcaaagataaagggttgtatcaatgcattattatccataagaaacccactggcatgattaggatccatcagatgaactctgagctttcagtcctg

SEQ ID NO: 1207 - DNA, 1980 bp, synthetic construct
  misc_feature 1..1980: note = LAG3 R97E 97-156-sugemalimab antibody heavy chain -CD86 IgV-Q25I/H90I polynucleotide
  source 1..1980: mol_type = other DNA
gagaggtatacagtgctttcagtaggtcctggcgggttgagatcaggaaggctgcccttgcagcctagagtgcagctggatgaacgcggccgccaaagaggagacttctctttgtggctgagacccgctaggagggctgatgccggcgagtatagggctgccgtgcacttgagagatagaggaggtggtggttctggaggagggggctcaggtggaggaggatcaggtggaggtggtagtggcgaagtccaacttcttgaatcagggggaggtttggtacaacccggaggcagccttaggctgtcatgtgcagcatctggctttacttttagttcctatgctatgtcctgggtgagacaagcccccggtaagggccttgaatgggtcagcggtatctctggcagtgggggattcacttactatgcagatagtgtcaagggcagattcaccatatcccgggataactccaagaatacactgtacctgcagatgaactccttgcgggctgaggatacagctgtgtactactgtgcaaagccccctagaggttacaattacggcccctttgactactggggtcaagggacattggtcacggtgtcttccgcctctaccaaaggccccagcgttttcccacttgccccttgttccaggtctacgtctgaatctactgccgccctgggctgtttggtgaaagactatttccccgagcccgtcacagtttcctggaactcaggggccttgacatccggcgtgcacactttccctgctgtgctgcaaagttccggcctgtactccctgtcatccgtcgtgacagtgcctagctcatctctgggcacaaagacctatacctgcaacgtcgaccacaaaccctctaatacaaaggtggacaagagagtcgagagtaaatatggtccaccttgcccaccgtgtcctgctcctgagttcttgggtggaccttccgttttcctttttccccccaagccaaaagacaccctgatgatctcccgaactcctgaagtgacctgtgtggttgtagatgtgtcccaagaggaccccgaagtgcaattcaactggtacgtcgacggggtcgaggttcacaacgccaagacaaaaccgcgggaagagcagttcaatagcacttatagagtggttagcgtgttgaccgtgctgcatcaagactggctgaatggcaaagaatacaaatgcaaagtctccaataagggcctgcccagttctatcgagaagactatctctaaagctaaaggtcagccccgggaaccgcaagtgtatacactgccgcccagccaagaggagatgaccaagaaccaggtctcactgacatgcttggtaaaggggttctatccctcagacatcgctgtggaatgggagtccaacggacagcccgagaataattacaagaccactcccccagtgctggactcagacggaagctttttcctgtattcacggctcacagtggataaaagtagatggcaagaagggaatgtcttcagctgctccgtcatgcacgaagccttgcacaatcactacacacaaaaaagcctgtcattgtccctcggagcaggtggaggagggtctggtggaggtggatctggaggtggtggaagtggcggaggtggttctggggcacctttgaaaattcaggcgtactttaacgagaccgctgaccttccctgtcagttcgctaattcccagaacatcagcctttctgagctcgtggtcttttggcaggaccaggagaacctcgtgctcaatgaggtatatctgggcaaagaaaagttcgactctgtgcacagcaaatacatggggaggacatccttcgattctgatagctggacattgcgcttgcataatctgcagatcaaggataaaggcctgtaccagtgtataattatccacaaaaagcccaccgggatgatccgcatccaccaaatgaattccgaactgtcagtgctg

SEQ ID NO: 1208 - DNA, 1980 bp, synthetic construct
  misc_feature 1..1980: note = LAG3 R97E 97-156-sugemalimab antibody heavy chain -CD86 IgV-Q25V/H90V polynucleotide
  source 1..1980: mol_type = other DNA
gagagatacacagtgctttctgtaggtcctggtggcctgagatcagggcgattgcccctgcagccaagagtccaactcgacgagcggggaagacaaaggggcgacttttctctctggttgagacccgcacggagggcagatgctggggaatacagagccgccgtgcatctgagagatagaggtggaggtggatctggtggaggaggttcaggaggtggcggatctggtggaggaggttctggggaggtccagctcctggaatccggtggcggactcgtgcaacctggaggatcactgagattgagctgtgcagcttcaggctttactttttcatcttatgccatgagctgggtgcgacaagctcctggtaagggactggagtgggtgtccggcataagtggcagtggcggttttacctactacgcggactctgtgaaaggccggttcaccatcagtagagataactcaaagaatacgctttacctgcaaatgaattccctgcgcgccgaagacaccgcagtgtactattgtgcaaaaccacctagaggctataactatggcccttttgactactgggggcaagggacactggtcaccgtatccagcgctagtacgaaagggcccagcgtgtttccattggctccgtgctctaggagtaccagcgagtcaactgcggcactggggtgtctggttaaggattactttcctgagccagtcaccgtatcctggaattccggcgcactgacctctggcgtgcatactttcccagctgtcctgcagtcatctgggctgtattccctgtcttctgtcgttaccgtgccctcatcaagtctgggaacaaagacctatacctgcaacgtggaccataagccctccaatacgaaggttgacaagcgggtcgagtcaaaatacggtccgccatgtcctccatgtccagcaccagagtttctgggagggcctagcgtcttccttttcccacctaaacctaaggataccctgatgattagccgcacccccgaggtgacatgcgttgtggtggacgtaagtcaggaagaccctgaagtgcagttcaattggtacgtagacggagtggaggtccacaacgcaaagaccaaacccagagaggagcaattcaattccacttacagggtggtttccgtactgactgtactccaccaggactggctgaatggcaaggagtacaagtgtaaagtctccaacaagggactgccatcaagtattgaaaagactatctctaaggctaagggacagccgcgcgagccacaggtttacactctgcctccctcccaagaagagatgacaaagaaccaggtctccttgacgtgcctcgtgaaaggcttttatcccagtgatatcgccgtggagtgggagtccaacggacagcctgagaataactacaaaaccacaccccctgtgttggacagcgatggatccttctttctctattcaagattgaccgtggacaagtctagatggcaggagggtaatgtgttctcttgcagcgtgatgcacgaggccctgcacaatcactatactcaaaagtcacttagtttgtctttgggagcaggaggaggcggttctggaggaggaggttcaggcggaggaggcagtggaggaggcggtagtggagcaccattgaagatccaagcatatttcaatgagacagcagatctgccctgtcagttcgctaatagccagaatgtttctctgtccgaactggttgtcttctggcaggaccaggagaacctggtccttaacgaggtatatttgggcaaagagaagtttgactctgtccatagtaaatacatgggacgcacgtcctttgatagtgacagctggaccctgaggttgcacaatctgcagatcaaggataaaggactgtatcagtgcatcatagtccacaaaaaacctactgggatgatccgcatccatcagatgaatagtgaactgagcgttctc

SEQ ID NO: 1209 - DNA, 1980 bp, synthetic construct
  misc_feature 1..1980: note = LAG3 R97E 97-156-sugemalimab antibody heavy chain -CD86 IgV-Q25V/H90I polynucleotide
  source 1..1980: mol_type = other DNA
gagagatataccgttttgtctgttggccctggaggccttcggtcaggcagattgccgcttcaacctagagtccagctggacgaacgggggcggcagagaggcgacttcagcctgtggcttcgaccagcgcgcagagctgatgctggggaataccgggctgctgtgcatttgcgggaccgcggggggggtggatccgggggcgggggtagcggcgggggagggagcggcggcggtggctcaggcgaggtgcagctgctggagagtggaggcgggctggtgcagcccggtggctccctgagattgtcatgtgctgcgtccggctttaccttcagctcatatgcaatgtcctgggttaggcaggcccccggcaaggggttggagtgggtgtcagggatctccggttcagggggtttcacttactatgccgattcagtgaagggtagatttaccatatccagggataacagtaagaacacactctacttgcagatgaactccctgagggccgaggataccgcagtgtattattgcgcaaaaccgcctcggggctacaactatggcccttttgactattggggacagggtacactcgtgacagtgtctagcgcgtcaacgaagggtccgtccgtttttcctcttgcaccctgtagccgatccacttccgagtccaccgccgccctgggctgtctggtgaaggattactttcccgagccggtgaccgtctcctggaattccggcgcacttacaagcggggtacacacatttccagcagtgctgcagtcaagtgggctgtatagcctgagtagcgtggtcaccgtgccatcttccagcctcgggaccaagacatatacgtgtaacgtggaccataagccttcaaacaccaaggttgacaagagggtggaaagtaagtatgggccgccttgccctccttgcccagccccagagtttcttggtggaccctccgtgtttctgttcccacccaaacctaaagacaccctcatgattagccggactcccgaagttacttgtgtggtggtggatgtgtcccaggaggatcccgaggttcaattcaattggtacgtggacggggtggaggtgcacaatgccaagacaaagccccgggaggagcagtttaatagtacttacagagttgtgtccgtgctgaccgtgctgcaccaggactggctcaatggaaaggagtacaagtgtaaggtttctaataagggcttgccttccagcatcgagaagacaatctctaaagcgaagggacagcctagagagccacaggtgtatacgttgcctccctctcaggaggagatgaccaaaaaccaggtctctctgacatgcttggtaaaaggattttacccatcagatatcgctgtcgaatgggagtccaacggtcaaccagaaaacaactataagaccacaccccctgtgcttgattctgacggcagtttcttcctgtacagccgactgacagtggacaagagtagatggcaggaaggcaatgtgttctcctgctctgtgatgcacgaggccctgcacaatcactatacccagaaatcactgtcacttagtttgggcgccggcggagggggatcagggggcgggggatctggaggtggggggtctgggggtggtggcagtggcgcacccttgaagatccaggcatacttcaacgaaacagccgatctgccctgccagtttgccaacagccagaatgtatctctgtcagagctggtggtcttctggcaggaccaggagaatctggtgcttaatgaggtgtatctcggcaaggagaagtttgattctgtgcacagtaaatacatggggcgaacctcattcgattccgattcttggacacttagactgcacaaccttcagatcaaagataagggtctgtatcagtgcatcattatacataagaaacccaccgggatgatcaggatccaccagatgaacagtgaactgtcagtgctg

SEQ ID NO: 1210 - DNA, 1980 bp, synthetic construct
  misc_feature 1..1980: note = LAG3 R97E 97-156-sugemalimab antibody heavy chain -CD86 IgV-Q25F/H90I polynucleotide
  source 1..1980: mol_type = other DNA
gagaggtatacagtgctgtctgttggtcctggaggcctgagaagtggtagactgcctctgcagccaagggttcagctggatgaacggggaaggcagagaggtgatttttctctgtggctgagaccagcccgaagggctgatgccggggagtatagggctgctgtccatttgagagatagaggaggaggaggatcaggcggaggaggaagtggagggggcggatcaggaggaggaggttcaggtgaggtccagctgctggagagcggaggaggattggttcaacccggcggctccttgcgcctttcatgtgctgcgtccggctttaccttctcatcttacgccatgagctgggtgagacaggccccaggaaaagggctggagtgggtctccggcattagtggttccggcggattcacctattacgctgatagcgtgaaagggagattcacaatttcaagagataatagtaagaatacactctacctccagatgaacagtctccgggccgaggatacagccgtgtactattgtgctaagcccccaagggggtacaactatggaccattcgactactggggccaggggaccctcgtaactgtctcatctgcgagtacaaaagggccctcagtctttccacttgcaccttgcagcaggtcaactagcgagtccacagcagccttgggttgtcttgtgaaggattatttcccggagccagtcacagtgtcttggaacagtggggcactgacctccggagtgcacactttccctgccgttctgcagtcatccggtttgtattctttgagcagcgtggttactgtcccgagttcttctttgggaaccaagacatacacctgcaacgtggatcacaagccatccaacaccaaggtggacaagcgggttgagtcaaagtacggacctccttgtccaccttgtccagctccagagtttctcggtgggccctctgtgttcctctttccaccaaagccgaaagatacactgatgatttctaggaccccagaggtaacctgtgtcgtggtggacgtttcccaagaggatccagaggttcagtttaactggtatgtagacggtgtggaagtgcataacgccaaaaccaaaccacgggaagagcagtttaactcaacatatcgggtggtctcagtacttactgttctgcaccaagattggctcaatgggaaagaatataaatgcaaggtgagtaataagggcctgccctcctctatcgagaaaaccatttccaaggctaaagggcaacctagggagccccaggtgtacacacttccaccctctcaggaagagatgaccaagaatcaggtatctcttacctgcctggtaaaaggcttttatccctcagacatagccgtggaatgggaatctaacgggcagcctgagaacaactacaagacaacacctcccgtccttgattctgatggaagtttttttctgtacagcaggctgaccgtggacaagtcaaggtggcaagagggcaacgtgttcagctgttccgtcatgcatgaggcactgcacaaccattatacccagaagagcctgtccctgtctctgggagcaggtggaggtggttctggtggaggtggaagtggaggtggaggttcaggaggaggtggttctggcgctcctctgaaaattcaggcgtactttaacgagactgctgacttgccctgtcagtttgccaattcccaaaacttttccctttccgagctggtggtgttctggcaagaccaagaaaatttggtccttaatgaggtttacctcggaaaagagaaattcgactctgtccattctaaatatatgggtcgaacgagcttcgatagcgatagctggacccttagactgcacaatctgcaaatcaaagataagggactctaccagtgcataatcattcataagaagcccacaggcatgatcagaatccaccagatgaattctgagcttagtgtgctg

SEQ ID NO: 1211 - DNA, 1980 bp, synthetic construct
  misc_feature 1..1980: note = LAG3 R97E 97-156-sugemalimab antibody heavy chain -CD86 IgV-Q25F/H90V polynucleotide
  source 1..1980: mol_type = other DNA
gaaagatatacagtgctgtcagtaggccccggcggtctgagatctggtagactgcctctgcagccgcgagtgcagctggatgagagaggtcggcagaggggcgatttcagtctgtggttgcgccctgcacgaagagccgatgcgggtgaatacagagccgcagtgcatctgcgggatagaggtggtggaggatctggtggtggtggttccggtggaggaggtagtggtggaggaggtagtggagaagtacaactcttggaatctggtggcggactggtacaacccgggggaagtctgcggctgtcatgtgcagctagcgggttcaccttcagctcttacgcaatgagctgggtgagacaggcccccggaaaaggactggaatgggtgtcaggtatttccgggtcaggggggtttacttattacgctgactcagtgaagggccgcttcaccatctcacgggataactctaaaaacaccctgtatctgcagatgaatagcctgagggccgaggatacagccgtttattattgcgccaagccgccccggggatacaattacggtccattcgactattggggacagggcaccctcgtgactgtgtcatccgcctctaccaaagggcccagcgtgttcccacttgcaccatgctcacgctccacttcagagagtacagccgcactcgggtgccttgtgaaggactattttccagaacccgtcaccgtgagttggaacagtggcgctctcacaagcggcgtgcatactttccccgccgtgctgcagtcatcaggcctgtatagtctgtcttccgttgtgactgtaccctctagcagccttggcaccaagacgtacacctgtaacgtcgatcataagccatctaacaccaaggtggacaagcgggttgagagcaagtatggcccaccatgtcctccatgtccagctcccgaattcttgggtggcccctctgtgttccttttcccccccaagccaaaagataccttgatgatctctaggacgcccgaagtcacatgcgttgtggtcgacgtgagccaggaagatcctgaggttcagtttaactggtacgtcgatggagttgaggtccacaacgctaagacaaaaccacgcgaggagcagtttaactccacatacagggtcgtgtccgtcttgacagttctgcatcaggactggcttaacggcaaggagtacaagtgtaaggtctccaacaaaggcctccccagctcaatagagaaaactatcagcaaggccaagggacagcctagggaaccacaggtgtacactctccctccctcacaggaggagatgacgaaaaaccaagtgtctttgacttgtctcgttaagggattctatccatcagacatcgcggttgaatgggagtcaaatggccagcctgagaacaattataagactacacctcccgttttggattctgacggctcctttttcctgtacagccgattgactgttgacaagagcagatggcaggaagggaatgttttttcatgtagtgttatgcatgaggccctccacaaccactacacccagaaaagtctgagcttgtctcttggagctggaggtggaggatctggaggaggaggatctggtggtggtggaagtggtggtggtggttccggtgctccactcaagatccaggcatactttaatgaaaccgcggacttgccctgccaattcgccaatagccagaacttttcccttagcgaattggtcgtgttctggcaggaccaggaaaatttggtcctgaacgaggtgtatctgggaaaggaaaagttcgattccgtgcattccaagtacatgggacggacgagctttgactccgattcttggacactgagacttcacaatctgcagataaaggacaagggattgtatcagtgcatcatcgtccacaagaaaccgacggggatgatcaggatccatcagatgaatagcgagctctctgtcttg

SEQ ID NO: 1212 - DNA, 1980 bp, synthetic construct
  misc_feature 1..1980: note = LAG3 R97E 97-156-sugemalimab antibody heavy chain -CD86 IgV polynucleotide
  source 1..1980: mol_type = other DNA
gaaaggtatactgtgctgtctgtaggccctggcggtctgagatcagggagattgccgctccagcccagagtccagctggatgaaagaggacggcagagaggcgacttcagcctctggctgagacctgcaaggcgcgctgatgccggagagtatagggctgctgtgcacttgcgagatcgaggtggaggaggaagtggaggaggaggatctggaggaggtggaagtggcgggggaggctctggagaggtgcagctgttggaatctggagggggtctggttcagccaggagggtctcttagactttcatgtgcagcttctggctttacattctcctcttacgctatgagctgggtgagacaggcacccgggaaaggcctcgagtgggttagtggcatttccggatcaggcgggttcacgtactacgccgatagtgtgaagggcagatttaccatctcacgcgacaactccaagaatacgctgtacctgcagatgaacagccttcgcgccgaggacacagccgtgtattactgcgctaagccacctcgaggatacaactacggccctttcgattattggggccaaggaacactggtgacagtcagttccgcctctacgaaaggtcctagcgtgtttccactcgccccgtgcagcagatctacgtccgagtcaacagcagctctcgggtgtctggttaaggattactttccagaaccagtcacggtgtcttggaactctggtgctctcacaagcggagtgcacacctttcctgccgtccttcagtcatcaggcctgtactctctgagtagtgttgtgacagtgcctagcagttcactggggactaaaacttacacttgcaatgtagaccacaaaccgtccaacaccaaagtagataagcgggtggaatcaaagtatggacctccctgtcctccatgtcccgctccagaattcctcggcggcccttcagtgttcctgtttccaccgaagcccaaagacaccttgatgattagtagaacgcccgaagttacgtgtgtggtcgtggacgtgtcccaggaagatccggaggttcaattcaactggtacgtcgatggagtagaggtgcacaatgctaaaactaaacccagggaagaacagttcaatagtacataccgggtcgtgagtgtattgacagtgttgcaccaggactggctgaacggcaaagaatataaatgcaaggttagcaataagggactccccagctcaatagaaaaaactataagcaaggccaagggacagccaagagagccccaggtttacacactgccccctagtcaggaagaaatgacaaaaaaccaggtgtccctgacatgcctggttaagggattctacccaagtgacatagctgtggagtgggagtccaatggacagcctgaaaataactataaaaccacccctcccgtgctcgactcagatgggtcttttttcctctactcaaggctgactgtagacaagtcccgatggcaagagggcaatgtattctcatgctccgtcatgcatgaagctttgcataaccattatactcagaagagtcttagtctgtctctgggagccggtggtggaggatccggtggagggggttctggtggaggaggatccggaggtggaggttcaggcgcacctctgaagattcaggcatatttcaacgagacagctgacctgccttgccagtttgctaacagtcaaaaccagtccctgtctgagttggtcgtcttctggcaggatcaagaaaacctggtcttgaacgaggtatatctggggaaggaaaagttcgatagcgtgcacagcaagtatatgggccgaacaagctttgacagcgattcatggactctgcggctgcacaacctgcaaatcaaggataaaggcctctaccagtgcatcatccaccacaagaagccaactggcatgatccggattcaccaaatgaattcagaactgtccgtcctc

SEQ ID NO: 1213 - DNA, 1098 bp, synthetic construct
  misc_feature 1..1098: note = LAG3 23-156-Fc polynucleotide
  source 1..1098: mol_type = other DNA
cttcaaccaggcgctgaagttccagttgtttgggcacaagaaggagcacctgcacagctgccatgttcaccaactattccactgcaggatttgtcactgctcagaagggcaggtgtaacttggcagcatcaacccgattccggaccaccagctgcagcaccaggacacccattggctcccggacctcatcctgctgctccttcttcatggggacccagacctagaagatataccgtgttgtcagtcggacctggtgggttgaggtcaggaagattgccactgcagcctagagtacagctcgatgaaagaggaaggcagaggggagatttctctctgtggcttcgccctgccaggagggctgatgcaggtgaatatcgggctgctgtacatttgcgcgatcgcgagcctaagtcctgcgataagacccacacttgtcccccttgcccagctcctgaactcctcggaggaccatccgtcttcctgttccctcccaagcccaaggacacactgatgatcagcagaacacccgaggtgacatgtgtagtggtggatgtgagccacgaggaccccgaggtgaagttcaattggtatgtggacggcgttgaggtgcataacgcaaagactaaacccagagaggagcagtacaatagcacgtatagagtagtgtcagtgctgaccgtcctgcaccaggattggctgaatgggaaggagtacaagtgcaaagtgtctaataaggccttgcccgctcctatcgaaaagacaatttcaaaggctaagggccagcccagagagccacaagtctacacgctgcctcctagccgcgatgagctgaccaagaatcaggtgtccctcacatgccttgtgaaaggattttatcccagtgatatcgccgtggagtgggaatcaaacggccagcctgagaacaactacaagacaactcctcccgtgttggatagcgacggcagctttttcttgtacagcaaactcactgtcgataagtccagatggcaacagggcaacgtgttcagctgtagcgtcatgcacgaggcactgcacaaccactacacacaaaagtccttgagccttagcccagggaaa

SEQ ID NO: 1214 - DNA, 1980 bp, synthetic construct
  misc_feature 1..1980: note = LAG3-Fc polynucleotide
  source 1..1980: mol_type = other DNA
ctgcaaccaggagcagaagttccagtggtatgggcacaagaaggagctccagctcagctgccatgtagtcctacaatacctctgcaggatctttccctgttgaggagggctggagtaacatggcagcatcagccagatagtggacctccagcagcagctcctggccatccacttgcacctggacctcacccagccgctccatctagttggggtccaagacccagaaggtataccgtattgagcgttggaccaggcgggctcagatctggtagactgcccttgcagcctcgagtgcaacttgatgaacgcggcagacaaaggggtgattttagtttgtggctgagaccagcaaggagagcagatgccggcgaatacagagctgctgtgcacctgagagacagagctctgtcttgtaggctgcggctcagattgggacaagcatccatgactgctagccctccaggtagccttagagcctccgactgggtgatcctcaactgctctttttctagacctgacaggcctgcatctgtccactggtttagaaataggggccagggcagagtgcctgtgagagagtcacctcatcatcatctggcagaaagcttcttgttcttgccacaggtttctcctatggatagcggcccgtggggctgcattctcacatatcgggacgggtttaatgtctcaattatgtacaaccttacggttctgggactggaaccccctaccccactgaccgtttatgctggagcaggcagcagggttggtctgccttgccgacttcctgctggtgtcggaaccaggagctttctcacagcaaagtggaccccaccaggaggtggcccagatctgctcgtgaccggagacaatggcgatttcaccttgaggttggaggacgtttctcaggcccaggccggaacatatacatgccatatccatttgcaagagcagcaattgaatgcaacagtgaccctcgctatcatcactgtgacacccaaatcattcggtagtcctggctccctcggtaagcttctgtgcgaagttacacccgtgtcaggtcaggagagattcgtttggagtagcttggacactcccagccaaaggtcattctcaggcccttggctggaggcacaagaggctcagctgttgagtcagccatggcagtgtcaactgtatcagggggagaggttgctgggagcagccgtatactttactgagctgtccagtcctggagctcaaagatctggaagagctccaggggcactgcctgcaggacaccttgaacctaagtcctgtgataaaacacacacttgtcctccatgtcctgcccccgagctgttgggtggtccttctgtgttcctgttccccccaaaaccaaaggacactttgatgatctctagaacccccgaagttacgtgcgtcgtagtcgacgtgtctcacgaggaccctgaagtcaaattcaactggtacgtggatggggtagaggtgcacaacgccaagaccaaacctcgggaggagcagtataactccacataccgcgttgtaagcgtgctgactgtactgcaccaggattggcttaatggaaaagaatataaatgcaaggtttctaacaaggccctccctgctccaatcgagaagacaatctctaaggccaagggacagcctagagagccgcaggtgtataccctgccaccctctcgggacgaactgacaaaaaaccaagtgtctctgacatgtctggttaaagggttctaccccagcgatatagccgttgagtgggaaagcaatggtcagcccgagaataattacaaaaccaccccacccgtgctggattctgacggcagcttcttcctctactccaagctcacagtcgacaagagcaggtggcagcagggcaatgttttctcatgcagcgttatgcatgaggctcttcataatcattatacacagaagagcctctctctgtctcctggcaag

SEQ ID NO: 1215 - DNA, 1113 bp, synthetic construct
  misc_feature 1..1113: note = LAG3 R97E 23-161-Fc polynucleotide
  source 1..1113: mol_type = other DNA
cttcagcccggagcagaagttcctgttgtttgggcacaagaaggagcacctgcccagcttccttgctcaccaacgatccccctgcaggacctcagtctgttgaggcgcgctggtgtaacctggcagcatcagcctgactctggtcctcccgcagctgcaccaggtcatccattggctcctggacctcatcccgcagcaccctcaagttgggggcctagaccagagagatatactgtcttgtcagtgggtcctggcggccttagatctggacgcctgcctctgcagcctagagttcaactggacgagagaggtcgccagagaggcgacttttcactgtggcttaggcctgctaggagggcagatgccggcgaatatagggccgctgtacatttgcgggacagggctttgtcatgcagggagcccaagtcatgtgacaagacgcatacctgcccaccatgtccagctccagaactgttggggggaccaagcgtgtttttgttccctcccaagcccaaagacaccctgatgattagccgcacccctgaagtgacgtgcgtcgtggtggacgtaagccatgaagatcctgaagtcaagtttaactggtacgtggatggggtggaggtgcataatgccaaaacaaagccccgagaggagcagtacaactcaacttatagagttgtctccgtcctgaccgtgctgcaccaagactggttgaacggaaaagaatacaaatgcaaggtgagtaataaggctctgcctgctcctattgagaagactatctctaaagccaagggacagcccagggagcctcaggtttatacccttccacctagcagggatgaactgacaaaaaaccaggtgtccctgacctgcctggtcaaggggttttacccctctgacatcgccgttgagtgggagagtaacggtcaacccgagaacaattacaagaccacacctcctgttctggacagcgatgggtcctttttcctctattctaaactgactgtggataaatcacggtggcagcaaggcaacgtgtttagttgcagtgtgatgcacgaagctctccacaatcactacacccagaaatcccttagcctctcccctggcaag

SEQ ID NO: 1216 - DNA, 1098 bp, synthetic construct
  misc_feature 1..1098: note = LAG3 R97E 23-156-Fc polynucleotide
  source 1..1098: mol_type = other DNA
cttcagccgggtgctgaagttcctgtagtatgggcacaagaaggagcacccgcacagttgccttgtagcccaacaattccacttcaggatttgagcctgttgaggagggctggagtcacttggcagcatcaacctgactcaggtcctcctgctgcagccccaggacatccactggctcctggaccacatccggctgcaccttcttcttggggtccacgacccgaaaggtacaccgtcctgagtgttggaccaggaggcttgcgaagcggtagactgcctttgcagcctcgagtacaactggacgagagaggaagacagagaggggattttagcctgtggttgcgaccggctaggagagctgacgctggggaatacagagctgcagtgcacctgcgagatagggagcccaagagttgcgataaaacccatacgtgtcccccatgccctgcaccggaattgctcggtggaccatcagtcttcttgttcccaccaaagccaaaggacacgttgatgatctcaagaactcccgaggttacatgtgtggtggtggacgtgtcacatgaggaccctgaggtgaagtttaactggtacgtggatggagttgaggtccacaatgccaagaccaaaccaagagaggagcagtacaacagtacatacagggtggtgtcagtgctgactgtgctgcaccaagattggctgaacggaaaagagtacaaatgcaaggtgagtaacaaagccttgcctgcaccaattgaaaagaccatcagtaaggccaaaggtcagcctcgagagccccaagtctatacactgccaccttctagagatgagctgactaaaaatcaggtgagtctgacttgtctcgtgaaggggttctaccctagtgacatagcagtggaatgggagagcaacggccagcccgagaataactacaagaccacaccgccagttctggatagcgacggttccttcttcttgtatagtaaactcaccgtggacaagagcaggtggcagcagggtaacgtgttctcttgtagcgtgatgcatgaggctctgcacaatcactatacacagaaatcattgagcctgtcacccggcaag

SEQ ID NO: 1217 - DNA, 876 bp, synthetic construct
  misc_feature 1..876: note = LAG3 R97E 97-156-Fc polynucleotide
  source 1..876: mol_type = other DNA
gaaagatataccgtcctgagcgttggtcctggcggtctcagatcaggacgcctgcctctgcaacctcgcgtccagctggacgagcgggggaggcaaagaggggatttttccctgtggctgcgacctgcaaggcgggcagacgccggcgaataccgggccgccgtgcatctgagagatagagaaccgaagtcctgcgacaagacacacacctgtccgccttgcccagctcctgagctgctcggcggcccttcagttttcttgttccccccaaaacctaaggatacccttatgatctctcgaacaccagaggtcacatgcgtggtggttgatgtgagccatgaggatccagaggttaagttcaactggtatgttgacggagtggaggtccacaacgcaaagacaaaaccacgggaggagcagtataatagtacgtacagggtggtgtctgttctgactgtgttgcatcaggactggctgaacggaaaggagtataagtgcaaggtcagtaataaagccctgcccgcacctatcgaaaagacaataagcaaggctaagggtcagccgagggagccccaagtgtatacactcccacccagcagagatgaactgactaagaaccaggtgtcccttacctgtctggtgaaggggttctaccctagcgacattgccgtcgagtgggagtctaacggtcaaccagaaaacaattacaaaacaacccctccagtgctggacagtgatggcagtttcttcctgtactccaagttgactgtcgacaaatccaggtggcagcaggggaacgttttctcctgttcagtgatgcacgaagcactgcataaccattacacacagaaaagcctgtctttgtccccaggcaag

SEQ ID NO: 1218 - DNA, 876 bp, synthetic construct
  misc_feature 1..876: note = LAG3 97-156-Fc polynucleotide
  source 1..876: mol_type = other DNA
agaagatatactgttctctctgttggaccaggcggcctgaggtctggaagactccctctgcaaccacgagtgcagctggacgaacgcggaaggcagagaggcgattttagtctgtggctgagaccagcaaggcgagccgacgctggagaatatagagctgccgtgcacctcagagaccgagagcctaaatcctgtgacaaaacccacacatgtccaccttgccctgctccagaactccttggcggacccagtgtgtttctgttccccccaaagcctaaagacactctcatgatcagtagaaccccagaagtgacgtgtgttgtcgtggatgtatctcatgaggatccagaggtgaaattcaactggtatgtggacggcgtggaggtgcacaacgctaaaactaagcctcgagaggagcagtacaattccacctacagggtggtcagcgtgcttacagtgctgcatcaagactggcttaacggtaaagagtacaaatgtaaggtgagtaacaaagctcttcctgctccaatcgagaagacaatcagcaaggccaagggacagcccagagaaccccaggtgtatactttgccacccagtcgagacgagttgaccaagaatcaggtgtcattgacctgtctggtgaaagggttttacccttctgatatagctgtggaatgggagagcaatgggcagccggagaacaattataaaaccactccccctgtcctggactcagacggatccttcttcctctactcaaaattgactgtcgacaagtctcgctggcagcagggaaatgtatttagctgcagtgtcatgcacgaagccctgcataatcattacacccagaaaagcttgagcttgtccccaggcaaa

SEQ ID NO: 1219 - DNA, 861 bp, synthetic construct
  misc_feature 1..861: note = LAG3 102-156-Fc polynucleotide
  source 1..861: mol_type = other DNA
ctctctgttggacctggtggattgagatccggaagacttcccttgcagcccagggtgcaacttgacgagagaggacggcagcggggtgatttttccctgtggctgcgaccagctagaagggctgatgctggagaatatcgagccgctgtacatctgagggacagggagccaaagagctgcgacaagacccacacatgcccgccttgtcctgctcccgaactcttgggcggcccttctgtatttctgttcccccctaagcccaaagacactctgatgatctcaaggacaccagaagtgacctgtgtggtagtcgatgtctcccacgaggatcctgaagtcaaatttaactggtacgtggatggggtcgaggtgcacaacgccaagaccaagccccgcgaagagcaatataattccacctacagagttgtgtccgtcctcaccgtcctccatcaggattggctcaacggcaaagaatataaatgcaaggtcagcaataaagccctgcctgctcctatcgagaagaccatctcaaaagctaaaggacagcctagagaacctcaggtctatacactgcctccatcccgcgacgagctcaccaaaaaccaggtgtcactgacgtgtttggtgaagggattttacccatctgacattgccgtcgagtgggaatccaacggacagcccgagaataactacaaaactacacctccagtcttggactcagacgggagcttttttctctacagtaagctgactgtggacaaaagccgctggcagcagggaaatgtgtttagttgttcagttatgcatgaggccctgcacaatcactatacacaaaagtcactgtccctgtcaccaggcaaa

SEQ ID NO: 1220 - DNA, 831 bp, synthetic construct
  misc_feature 1..831: note = LAG3 112-156-Fc polynucleotide
  source 1..831: mol_type = other DNA
ggtagactgccgttgcaacctagagttcagcttgatgaacgagggaggcagagaggcgatttctctttgtggctcagaccagcaaggagggccgatgccggtgagtatagagcagccgtgcatttgagagaccgagaacctaaatcctgcgacaagacccatacctgtcctccctgtccagctcccgaattgctgggaggccctagtgtgtttctgttccctcctaaacctaaggataccttgatgatctcccgcacccctgaagtcacctgtgttgtggtggacgtcagccacgaagacccagaggtgaagtttaattggtatgtcgacggagtcgaggtgcataacgccaaaactaagccccgcgaggagcaatataactccacctaccgagtggtctccgtgcttaccgtattgcaccaggactggctcaacggtaaagagtataaatgcaaagtgtctaacaaagctttgcctgctcccatcgagaaaacaatttctaaggcaaaagggcagcccagggagccacaagtgtacacactgcccccatcccgggatgagctcactaagaaccaggtatcattgacatgtctggtgaaaggtttttatccctctgatatcgctgtagagtgggaatctaatggtcagccggaaaataactacaagacaacccccccagtgcttgattctgatggaagctttttcctgtatagcaagttgacagtggataagagcagatggcaacagggcaatgtgttcagctgttcagtgatgcacgaggctctccacaaccattatacacaaaagagtttgtctttgtcccctggtaag

SEQ ID NO: 1221 - DNA, 801 bp, synthetic construct
  misc_feature 1..801: note = LAG3 122-156-Fc polynucleotide
  source 1..801: mol_type = other DNA
ttggatgagagaggcaggcagaggggagatttttcattgtggttgagacccgcaagacgagctgacgctggggaatacagagccgctgtgcacctccgggatagagaacctaagtcctgtgacaagacacatacctgtccaccatgtcctgcccccgaattgctcggaggaccaagtgtgtttctgtttccaccaaaacctaaggacacactgatgatttctcggactcccgaggttacctgtgtggtggtggatgtctctcacgaggatccagaggtaaaatttaattggtatgtggacggtgttgaggtgcataatgcaaaaactaaaccaagagaggagcagtacaactccacctatagggtggtgagcgtgcttacggtcctgcaccaggactggctcaacggcaaggagtacaagtgcaaggtaagcaacaaagctttgcccgcccccattgagaaaaccatctcaaaggcaaaaggtcagccgcgcgaaccacaggtgtatacactgccgccatccagagacgaattgaccaaaaaccaagtctctctgacttgcctggttaagggattttatcccagcgacatcgccgtcgagtgggaaagcaacggacagccagagaataattacaaaacaaccccacccgtgctcgactctgacggcagtttctttctgtactccaagcttactgtcgacaaatctaggtggcagcagggtaacgtatttagctgttcagttatgcacgaagccttgcataaccattatacacagaagagcctgtccctttctcccggcaag

SEQ ID NO: 1222 - DNA, 1068 bp, synthetic construct
  misc_feature 1..1068: note = LAG3 R97E 23-146-Fc polynucleotide
  source 1..1068: mol_type = other DNA
ttgcaaccaggagcagaagtaccagtggtttgggctcaagagggtgctcccgctcagcttccttgtagcccaacaattccacttcaagacctctcactcctgaggagagccggagtcacatggcagcaccagcctgattcaggacctcctgcagctgcaccaggccatcctttggcacctggtcctcaccctgcagctccaagttcatggggtcctagacccgaacggtatacagtcctttctgtcgggcctggaggtctcaggtctggaagactgcccctgcaacctcgcgtgcaactggatgagaggggaaggcagaggggtgacttctctctgtggcttaggcctgctcgaagagctgatgccggggaggagcctaagtcctgcgataaaactcatacttgtcccccttgtccagctcctgaactgctgggcggaccctcagtttttctctttccaccaaagccaaaggataccctgatgatctcaagaactccagaagtgacctgcgtggttgtggatgtgtcacacgaggatcctgaggtgaaattcaattggtacgtggacggcgtggaagtgcacaatgctaagacaaagccaagagaggaacagtataactctacgtatcgcgtggtgtccgtcctgacggttcttcaccaggattggttgaacggcaaggagtacaagtgtaaagtaagcaacaaggcactgcctgctccaatcgaaaagactatttctaaggcaaaaggacagccccgggaaccccaggtctatactctgcctccatccagggatgaactcaccaagaatcaggtgtccttgacttgtctggtgaagggcttttatccatccgacatagcagtggaatgggaaagcaacgggcagccggaaaacaactataagactaccccccctgtgttggacagcgacggctcattttttctgtactccaagctgactgtcgataaaagcaggtggcagcaggggaatgtgttttcttgctcagtcatgcacgaggccctgcataatcattatacacagaaatccctgtccttgtcccctgggaag

SEQ ID NO: 1223 - DNA, 1035 bp, synthetic construct
  misc_feature 1..1035: note = LAG3 R97E 23-136-Fc polynucleotide
  source 1..1035: mol_type = other DNA
ttgcagcctggtgctgaagtcccagttgtttgggctcaagaaggagcacctgcccagcttccttgctcaccaactattccactgcaggatttgtcactcttgaggcgagctggcgtgacttggcaacaccagccagatagtggacctccagctgctgcacctggacacccactggcacctggtcctcatcctgcagctccaagcagttggggacccagaccagagaggtacacagtccttagtgttggacctgggggactgagaagcggaagactgcctttgcagcctcgagtccagctggatgagagaggcaggcagaggggagatttctccttgtgggaaccaaagtcatgtgataagactcacacctgcccaccatgcccagcacctgagttgctcggtggccctagtgtgttcctgttcccacctaagccgaaggatacactgatgatctcaagaacacccgaagtgacatgtgtggtggtggatgtgagtcatgaggatcccgaggttaagtttaattggtatgtggacggggtagaagttcacaacgccaagactaagccccgcgaagagcagtataacagcacctaccgcgtggtgagcgtgttgacagtgctgcaccaggactggctgaatgggaaagagtataagtgtaaagtgagcaacaaagcccttcccgctcccattgagaagactatctcaaaagcaaaaggacagcccagagaaccgcaagtatacacactgcctcctagcagagacgagcttacaaagaaccaggtgagcctgacatgtctcgtgaagggattctatcccagtgatattgctgtggagtgggagagtaatggacagccagagaacaactataagacaaccccaccagtgctggattctgacggtagcttcttcctgtacagtaaattgactgtcgacaaatccaggtggcagcagggcaatgtgttctcatgttctgtgatgcacgaggcactgcataaccactatacccaaaagtccttgtcattgtccccagggaag

SEQ ID NO: 1224 - DNA, 1017 bp, synthetic construct
  misc_feature 1..1017: note = LAG3 R97E 23-129-Fc polynucleotide
  source 1..1017: mol_type = other DNA
ttgcaaccaggagcagaagtcccagttgtatgggctcaagaaggtgccccagcacagctcccatgttctcctaccatccccctgcaggatttgtcactgttgcgcagagccggcgtaacatggcagcatcaaccagacagtggtcctcctgctgctgcccctggacatcctctggctcctggtccccatcctgcagcaccaagctcatgggggcctagaccagagcggtacactgtgctctcagttggtccagggggacttagatccggaagacttcctcttcaacccagagtgcagcttgacgaaagaggacggcagagagaacccaagtcatgtgacaagacacacacttgtcctccttgtcctgcacctgaactgctcggaggccctagcgtgttcctgtttccaccgaagccaaaagacacactgatgataagtaggacccctgaggtgacctgtgtcgtggttgatgtaagccacgaagaccctgaagtgaaatttaactggtacgtcgacggagtagaggtccacaatgctaaaactaagccccgggaggagcagtataatagcacctacagggttgtgagtgtgctgaccgtcctccatcaggattggcttaacggaaaggagtacaagtgcaaggtaagcaataaagctctgcccgcccccatcgagaagaccatttccaaggcaaaaggtcagcctcgggagccacaggtatacactttgcccccatcccgcgacgagttgaccaaaaaccaggtatcactcacatgcttggtgaaaggattctacccgagcgacatcgcagtggagtgggagtctaacggacagcccgaaaacaattataagacaacaccccctgtgctggatagtgacgggagcttcttcctgtacagtaagttgaccgtcgacaagtcacggtggcagcaagggaatgtgttttcctgctccgttatgcacgaagccctccataaccattatacccagaaatcactcagcctctctccagggaag

SEQ ID NO: 1225 - DNA, 996 bp, synthetic construct
  misc_feature 1..996: note = LAG3 R97E 23-122-Fc polynucleotide
  source 1..996: mol_type = other DNA
ttgcagcctggagctgaagttccagttgtgtgggcacaagaaggagctccggcacagcttccatgtagtcctactatccctctgcaagacctctccctgctcagaagggctggcgtcacatggcagcaccagccagatagtggacctcctgctgccgctcctggacatcctctggcaccaggtcctcatcctgcagccccttcttcttggggaccaagaccggagcgctatactgtgctttcagtgggtcctggtggtctgagaagcgggagactgccactgcagcccagagtgcagcttgagcccaagtcctgcgacaagacccacacttgcccaccttgcccagctcccgaactcttgggcggtccaagcgtttttctgtttcctcccaagcctaaggatactctcatgatttcccggacacctgaagttacatgcgtggtcgtggacgtcagtcatgaggacccggaggtcaagttcaactggtacgtggatggtgtggaagttcataacgccaaaacaaaaccccgggaggaacaatacaattccacttaccgggtcgtgtccgtgctgacagtcctgcatcaagactggctgaacggcaaagagtacaagtgcaaagtgtcaaacaaggctctgcctgcacctatagagaagactatatcaaaggcaaagggacagcctcgagaaccccaggtgtacacactgcccccaagccgagatgagctgaccaagaatcaggtgtccctgacctgcctggtaaagggtttttaccctagcgacattgccgtggagtgggaaagtaacggccagccagagaacaattacaagacaaccccccccgtcctcgattctgacggaagcttttttctttatagcaagctgactgtggacaagagtaggtggcagcaggggaacgtgttcagctgctccgtgatgcacgaagcactgcataaccactacacccagaaaagcctttccttgtcccctggtaag

SEQ ID NO: 1226 - DNA, 1050 bp, synthetic construct
  misc_feature 1..1050: note = LAG3 R97E 44-161-Fc polynucleotide
  source 1..1050: mol_type = other DNA
tgttcacctacaattcctcttcaggacctgtccctgttgagacgagccggcgtgacatggcagcaccaacccgactctggtcctcccgccgccgcacccggacacccactggctcctgggcctcatccagcagctcctagcagttggggaccaagacctgagagatacacagtgctttctgtggggccgggtggtctgaggagcggccggctcccgctgcagcccagggtccaacttgatgagagaggcagacaacgaggcgacttctccctctggctgcggcccgctcggagagccgacgccggcgaatatcgggcagccgtgcatctcagagaccgagcactgagctgcagagaaccgaagagctgtgataagacccacacctgtcctccttgccctgcccccgaactgttgggaggtccaagcgtcttcctgttccctcctaaacctaaggacaccctgatgattagcaggacacctgaggtgacctgtgtggtggtagacgtaagccacgaggatccagaagtgaagttcaactggtacgtcgacggtgtagaagtccacaacgctaaaacaaaaccaagggaagagcagtacaactcaacatatcgggtagtgagtgtcctgacagtcctccatcaagactggctgaacggcaaagagtacaaatgcaaagttagcaacaaagctctgcctgctcctatagagaagaccatctccaaggccaaaggccagcccagagaaccacaggtgtatactctcccgccgagcagggacgaactcaccaagaatcaggtaagcctgacttgtttggttaagggtttttacccatcagatatagcagtggagtgggagtctaatggtcagcccgagaacaactataagacaacccctccagtactcgactctgacggcagcttcttcctgtacagcaagttgaccgttgataagagcaggtggcaacagggaaacgtgtttagctgcagcgtgatgcacgaagccctgcacaatcattatacccagaagtccctgtccctctcccctgggaag

SEQ ID NO: 1227 - DNA, 1002 bp, synthetic construct
  misc_feature 1..1002: note = LAG3 R97E 60-161-Fc polynucleotide
  source 1..1002: mol_type = other DNA
ggagttacatggcagcatcaaccagattctggtcctcctgcagctgcacctggtcatcccctggctcctggtccacatccagcagctccatcttcatggggtcctcggcctgaacgatatactgtactttctgtggggcctgggggactcagatctggcagactcccactgcaaccacgggtccaactggatgaaagaggccgccagaggggcgacttctcattgtggttgaggcctgctagacgcgcagacgcaggcgaatatagagctgcagtgcatctgagagatcgggctctgtcctgcagggagcctaagtcctgcgataaaacacatacttgcccaccttgtcctgcaccagagctgttggggggcccaagtgtgttcctttttcccccaaagccaaaggacaccctgatgattagcaggacgccagaggtgacatgcgtagtggtggatgtgagtcacgaggatcctgaggtaaagtttaattggtatgtggatggcgtagaggtgcacaacgccaagaccaagccccgcgaggaacagtataactctacctaccgggtcgtgtctgtgttgaccgtgctgcatcaggattggcttaatgggaaggaatataaatgcaaggtcagcaacaaagctcttccagcacctatcgaaaagaccattagtaaagctaagggccagcctcgagaacctcaggtctatacactgcctccaagtcgggatgagctgactaagaaccaggtgtctctcacatgcctggtgaaagggttctatcccagtgacatcgccgtcgaatgggaaagtaatggacagcccgaaaataactataagaccactcctccagtgctggactctgacgggagcttcttcctttacagcaaacttacagtggataagtcacggtggcagcagggaaacgttttctcttgttctgtcatgcatgaggccctgcacaatcactacactcagaaatctctgtctttgagcccaggcaag

SEQ ID NO: 1228 - DNA, 978 bp, synthetic construct
  misc_feature 1..978: note = LAG3 R97E 68-161-Fc polynucleotide
  source 1..978: mol_type = other DNA
gattcaggacctccagctgctgcacctggtcatccattggcaccaggtcctcaccctgcagcacctagttcatggggacctagaccggagcgctacactgtgctgtccgtgggacctggtggcttgcgatctggaagactccctcttcagcctagagtccaattggacgagcggggacggcagagaggagactttagtctgtggctcaggcccgctagaagagctgatgcaggcgaatacagggcagctgtgcacctgagagacagagctctctcttgccgagagcccaaaagctgtgacaaaacccacacatgtccaccatgtcccgcccctgagttgcttgggggtccatcagtgttcttgtttcctcctaaacctaaggacaccctgatgataagtcgcactcccgaggtgacatgtgtcgtcgttgatgtgagccacgaagatcctgaggtaaagttcaattggtacgtcgacggcgtggaggtccacaacgctaaaaccaaaccacgcgaagaacagtacaacagtacctaccgagttgtttctgttcttacagtacttcaccaggactggctgaacggcaaagagtataagtgtaaggtgtctaataaagccctgcctgcccctatcgaaaaaactatttccaaagctaagggtcaaccaagggaacctcaggtttacaccctgcctccaagccgagatgagctgaccaagaaccaggttagtctgacctgcctggtgaaagggttctaccccagcgacatagccgtggagtgggagtctaacggacagccagagaacaactacaaaactacacccccagtccttgacagcgatggcagcttttttctgtactcaaaactgactgtggataaatcccggtggcagcagggcaatgttttcagctgttctgtaatgcatgaggctctgcacaaccactatactcagaaaagtttgagcctctctccaggaaaa

SEQ ID NO: 1229 - DNA, 933 bp, synthetic construct
  misc_feature 1..933: note = LAG3 R97E 83-161-Fc polynucleotide
  source 1..933: mol_type = other DNA
ggacctcatccagctgctccttcatcatggggaccaagaccagaaagatacaccgtgctttctgtgggcccaggtggactgaggtccggtagactcccccttcagcctagagtgcaactggacgaaagaggcaggcaaagaggcgatttctccttgtggctgaggcctgctcgaagggcagatgcaggcgagtaccgggctgctgtccatctcagagatcgggcactcagttgtagagagcctaaatcttgcgacaaaacccatacctgtccaccttgtccagctccagaactgttgggtggacctagcgtgtttcttttcccgcccaagcctaaggacacacttatgatctcacgcacccctgaagtcacctgtgtggtggttgatgtaagtcacgaggatcctgaggttaaatttaattggtacgtggatggagttgaggtccataacgctaagactaaacccagagaagaacagtacaactctacttacagagtggtgagcgtcttgacggtgttgcaccaggattggttgaatggcaaggagtataagtgtaaggtgtccaataaggcactcccagcccccatcgagaagaccatcagcaaggctaaaggtcaaccacgggaaccacaggtgtatacacttccaccctcccgggatgaattgacaaagaaccaggtctccctcacttgtctggtcaaggggttctatccctctgacatcgccgtggagtgggagtccaatggtcagcctgagaataattacaagactactccccctgtgctcgattccgacggctcattttttttgtactccaaattgaccgtcgacaagagtcggtggcagcaggggaatgtgttcagttgctcagtgatgcatgaggcactccataaccactatactcagaaatctctctccctgtctccaggaaaa

SEQ ID NO: 1230 - DNA, 900 bp, synthetic construct
  misc_feature 1..900: note = LAG3 R97E 94-161-Fc polynucleotide
  source 1..900: mol_type = other DNA
cctaggccagaaaggtacacagttttgtctgtaggtccaggaggactgcgctccgggagacttccacttcaacctagggtgcagctggatgagcgaggaaggcagaggggcgatttcagcttgtggttgaggccagctcgacgggctgatgccggagaatacagggctgctgtgcatctgagagacagggctctgagctgcagggagccaaagtcctgcgacaaaacccacacttgtccaccttgtccagctcctgagctgctgggcggaccaagtgtgttcctgtttccccctaagcctaaggacacactgatgatttctaggacacccgaagttacatgtgttgtggtggacgtgagccatgaagatccagaggtgaaattcaactggtacgtggacggagttgaagtccacaatgctaaaaccaaacccagggaagagcaatataatagcacttatcgcgtggtcagtgtactgactgtgctccaccaggactggctgaacggcaaggagtataagtgtaaggtcagcaacaaagccctgcccgctcccatcgaaaagacaatcagtaaggccaaaggccagcctcgggagcctcaagtatacaccctgcctccaagtagggacgagctgactaagaatcaggtgtcccttacctgccttgtaaagggcttttatccatctgatatcgccgttgagtgggaatctaacggccagccagagaacaattacaaaactacaccgcctgtgctcgactctgatggtagctttttcctgtatagcaagctgacagtggacaagagccgctggcagcagggcaatgtgtttagctgctccgtcatgcacgaggcactgcacaatcactatactcagaagagcctgtcactgagtcctgggaaa

SEQ ID NO: 1231 - DNA, 1098 bp, synthetic construct
  misc_feature 1..1098: note = LAG3 R97E 28-161-Fc polynucleotide
  source 1..1098: mol_type = other DNA
gaagttccagttgtttgggctcaagaaggcgcacctgctcaactgccttgcagtcctaccatcccgcttcaggacctctctctgctgagaagggccggcgtcacatggcaacatcagcctgattccgggccacctgctgctgcaccaggacatccacttgcccctggacctcatcctgctgctccctcttcatggggacctcggcctgagaggtacacagttcttagtgtgggccctggtggcttgaggtctggaaggctgccactgcaaccccgagtccagctggatgagagaggtcgccagcgaggggacttttccctgtggctgagaccagcaagaagagccgatgcaggggaatatcgagcagcagtgcatttgcgcgaccgcgcactgtcttgtagagagccgaaaagctgtgacaagacacacacatgcccaccatgtcctgcacctgagcttcttgggggaccctccgtctttctctttcctccaaaacccaaggacaccctgatgatttcccggacgcccgaggtcacctgtgtggtagtggacgtgtctcacgaagatcccgaggtaaaattcaattggtatgtcgacggcgttgaagtccacaatgccaaaactaagcctagggaagagcagtacaatagtacttatagggtggtctctgtcctgaccgtgttgcatcaggattggctgaatggtaaggaatacaaatgtaaggtcagtaacaaggctctccctgcccccattgagaagacaatatccaaggctaagggtcagcctcgagagccccaggtctacacattgccgccttctcgggacgaactcacaaaaaatcaggtaagtctgacatgcctcgtaaagggcttctacccctccgacattgccgtggagtgggaaagcaatgggcaacctgaaaacaattacaaaaccaccccacctgtgctcgatagcgatggcagtttttttctgtatagcaagttgaccgtcgacaaatctcggtggcagcagggtaacgtgttctcttgtagtgtgatgcacgaagctttgcataaccattacacacagaaaagcctgtctctctccccaggaaag

SEQ ID NO: 1232 - DNA, 876 bp, synthetic construct
  misc_feature 1..876: note = LAG3 102-161-Fc polynucleotide
  source 1..876: mol_type = other DNA
ctgtctgtaggccctggaggattgagatctggcagacttcctcttcaaccccgagtgcagttggatgagaggggaagacagcgaggagacttctccctgtggctgagacccgccaggagagctgatgcaggcgagtatagggccgccgtccatctgcgagatagagccttgtcttgccgcgagccaaagtcatgcgacaaaacacatacctgccctccttgtccagctcctgagcttttggggggtcctagcgtgtttctcttcccacccaagccgaaggataccctcatgatcagtaggacccctgaggtaacgtgtgtagtggtggatgtttctcatgaggacccagaggttaagttcaactggtacgtggacggggtggaggtccacaatgccaagacaaaacctagggaagagcaatacaactctacttatcgggtggtgtccgtgctcacagtcttgcaccaagattggctgaacggaaaggaatacaagtgcaaagtatcaaataaggctctgccggcccccatagaaaaaacaatttccaaggctaagggacagcctcgggagcctcaggtttacacactgccaccatctcgggacgaacttaccaagaaccaggtctcattgacatgtctggtgaaagggttctatccatcagacatcgccgtcgagtgggagtctaatggtcaacccgagaataattataaaaccacacctcctgtgctggactctgacgggagcttttttctttactctaagctgaccgtggataagtcacgatggcagcaggggaatgtgttctcttgcagcgtgatgcacgaggcacttcacaaccactatacacaaaaatccctgagcctgtcacctggtaaa

SEQ ID NO: 1233 - DNA, 861 bp, synthetic construct
  misc_feature 1..861: note = LAG3 107-161-Fc polynucleotide
  source 1..861: mol_type = other DNA
ggaggattgagaagcggtaggcttcctttgcagcctagagtgcaactggatgaaaggggcagacagcgaggagacttctcactttggctcagacctgcaagacgcgccgatgctggcgaatacagagccgctgtgcaccttcgagacagggctctctcctgtcgggagccaaagtcctgtgacaagacccacacatgccctccttgtcctgcacctgagttgctcggagggcccagtgtgtttctctttcccccaaagcctaaagataccctgatgatctcaaggactcctgaggtgacctgtgttgtggtagacgtgtcacacgaagaccctgaggttaagttcaattggtatgtcgacggcgtggaggtacataacgccaagaccaagccacgcgaggagcagtacaatagtacttaccgcgtcgtgagcgtactgaccgtcctgcatcaggactggttgaatggtaaggagtacaagtgcaaggtaagtaacaaagctctgccagctccaatcgaaaaaacgatttctaaagctaagggtcagcctcgcgaaccccaggtgtataccttgcctcccagccgcgatgaacttaccaagaaccaggtgtcactcacgtgccttgtgaaaggtttctacccctctgacattgccgtcgagtgggaaagtaacggccagcctgaaaacaactacaagactacccccccagtcctggattctgatgggtctttcttcctctactccaagttgaccgtggataagagccgatggcagcaagggaatgtcttttcctgctccgtgatgcacgaagcactgcataaccactacacgcagaagtccttgagtctttcacccggaaaa

SEQ ID NO: 1234 - DNA, 846 bp, synthetic construct
  misc_feature 1..846: note = LAG3 112-161-Fc polynucleotide
  source 1..846: mol_type = other DNA
ggtaggttgccattgcagcctagagtccaattggacgagagaggaagacagaggggagacttttccttgtggctgagacctgctcggagggctgatgctggggagtatcgagccgcagtacaccttcgggacagagcactttcttgtcgcgaaccaaagtcatgcgacaaaacacatacatgcccaccatgtcccgctcctgagctgcttggtggaccaagtgtgtttctgtttcctccaaagcctaaggacacccttatgatatcacgcactcctgaagtgacctgcgtggtcgtggatgtgtcccatgaggatcctgaagtcaaattcaattggtacgtggacggggtggaagtgcataacgctaagactaagccgagagaggaacaatacaattccacatatagagtcgtcagtgtgctgaccgttttgcaccaagactggctgaatggcaaggaatacaagtgcaaggtctctaataaggctttgccagcccccatcgaaaagactatctccaaagccaagggccaaccccgagagcctcaagtgtacacactgccgcctagtagagacgagctgaccaagaaccaggttagcctgacatgcctggtgaagggtttttaccccagcgatatagccgttgagtgggagtctaatgggcaacccgagaataactataaaactacgccccccgttctggattcagatggaagcttctttttgtacagcaagctgacggtggataaaagcaggtggcagcagggtaatgtcttctcttgttccgtcatgcacgaggcactccacaatcattatacccagaaatctttgagcttgtcaccaggcaag

SEQ ID NO: 1235 - DNA, 831 bp, synthetic construct
  misc_feature 1..831: note = LAG3 117-161-Fc polynucleotide
  source 1..831: mol_type = other DNA
cagcctagggttcagttggatgagagaggcaggcaaagaggtgatttctccctttggttgaggccagcaaggagagccgatgcaggcgaatatagagccgcagtccatctcagggacagggctctgtcttgcagagaacccaaatcctgcgacaaaacccacacatgtccaccctgccctgctcctgagttgcttggtggaccttcagtcttcttgtttccacctaagccgaaggatacactgatgattagccggactccagaggtgacatgcgtggtggtggacgtaagccatgaggaccccgaggtgaagttcaactggtatgtggacggtgtcgaggttcacaatgccaagaccaagcccagagaggaacagtacaacagtacatatagggtggtttccgtactgaccgtcctgcatcaggactggttgaacggtaaggagtacaaatgtaaggtgtctaacaaagcactgcccgcacctatcgagaaaacgatatcaaaagctaagggacagccacgagagcctcaggtttacacactcccgcctagtagagatgagctgactaagaaccaggtgtcccttacatgtctggtgaagggattttatccttcagatatcgcagtggagtgggagtccaatggccagccagaaaataactacaaaacaacaccccctgtccttgactccgacggctcattctttttgtacagcaagctgactgtggataagagcaggtggcagcagggcaacgtgttctcatgctccgtcatgcatgaagctctgcacaaccactatacacaaaagagcctcagcttgtcacccggaaag

SEQ ID NO: 1236 - DNA, 816 bp, synthetic construct
  misc_feature 1..816: note = LAG3 122-161-Fc polynucleotide
  source 1..816: mol_type = other DNA
ctcgatgagagaggacgccagagaggagatttctcattgtggcttaggcctgccagaagagctgacgctggtgaatatagggctgccgtccatcttagagatagagcactcagctgtagagagcctaagtcctgtgataagactcatacatgtcccccatgccctgcaccagaactgctcggaggcccatctgtgttcctcttcccccctaagcccaaggataccctgatgatttcaaggacacccgaggtgacctgtgtggtggtcgacgtcagtcatgaagaccctgaagtgaagttcaactggtacgtagatggcgtggaggtccacaacgctaagacaaaacctagagaagagcagtacaacagcacttatagggtcgtttcagttctgacggttttgcaccaggattggctgaatggcaaggagtataagtgtaaagttagcaataaggccctgcctgccccaatcgagaaaacaatttccaaggcaaaaggacagccccgcgaaccacaagtgtataccctccctccatcccgggacgaactgaccaagaatcaggtgtctttgacttgcttggtcaagggcttttatcccagtgatattgcagtggagtgggagtctaacgggcagccagaaaataattataaaaccacaccccccgtgttggattctgatggctcatttttcttgtactctaagctgacagtagacaagagtcggtggcaacagggcaacgtcttctcttgcagcgttatgcatgaggcactccataaccattacacacagaaaagcttgtccctgtccccggggaag

SEQ ID NO: 1237 - DNA, 894 bp, synthetic construct
  misc_feature 1..894: note = LAG3 102-167-Fc polynucleotide
  source 1..894: mol_type = other DNA
ttgtcagtgggacctggtggattgagatctggcagactgcctttgcagccaagagtgcaattggatgaaagaggacgccaacgcggggatttttccctgtggttgagaccagcccggagagcagacgctggagaataccgggccgcagttcatctccgcgatagagccttgtcatgccgattgaggcttcgcctgggcgagccaaaaagctgtgataagacgcatacttgccccccttgccctgcaccagaacttcttggaggcccatctgtgtttttgttcccccccaagcccaaggacactcttatgattagtcgaacacctgaggtgacatgcgtcgttgtggacgtgtctcatgaggatccggaggtgaaatttaactggtatgtggacggagtagaggtgcacaacgcaaagaccaaacccagagaggaacagtataactcaacctatagggttgtctccgtgcttaccgtgttgcaccaagactggctgaacggcaaggagtataaatgcaaagtgagcaacaaggcgctgcctgcacccatcgagaagactatttccaaggccaaaggccagcctagggagcctcaggtctatacgctcccaccctccagagacgagttgacgaagaaccaagtgtctctgacctgcctggtgaagggcttctacccatctgatatcgctgtcgaatgggaaagtaatggccagcccgaaaacaactacaaaaccacgcctccagtgctggactcagacggaagcttcttcctgtacagtaaactgactgtggacaagtccaggtggcagcagggtaatgtcttctcttgcagtgtgatgcacgaggccctgcacaaccactacacccaaaagtcactgtctttgtctccggggaaa

SEQ ID NO: 1238 - DNA, 846 bp, synthetic construct
  misc_feature 1..846: note = LAG3 107-156-Fc polynucleotide
  source 1..846: mol_type = other DNA
ggaggccttcgatctggacgattgcctctgcaaccaagagttcaactggatgaaagaggtagacaaagaggcgattttagcttgtggctcagacccgccagaagagcagatgctggggaataccgcgcagctgtgcacttgcgcgatagggaaccaaaatcatgtgataagacgcacacttgtcctccatgccccgctccagaacttttgggagggcccagcgtgttcctgtttccacctaagcccaaggacacactgatgatctcaagaacaccagaagtcacctgtgtggttgtcgatgtgtctcacgaggatcccgaagtgaagttcaactggtacgttgatggagtggaggtgcacaacgccaaaactaaacctagggaagagcaatataatagcacatacagggttgtgtccgtgttgacagtgttgcatcaagactggctcaacggaaaggagtataaatgcaaggtgtcaaacaaagcactgcccgccccaattgagaaaacaatttcaaaggccaagggtcagcccagagaaccacaggtatacacactgcctccttcccgggatgaattgactaaaaaccaggtgagcctgacttgcttggtgaagggtttctacccatccgacatcgcagtggagtgggagtccaatgggcagcccgaaaacaactataagaccactccccccgtgcttgattctgatgggagctttttcttgtattccaaactgaccgtggacaaaagcaggtggcagcagggcaacgtcttctcttgctctgtcatgcatgaggctctgcacaaccactacacccagaaatctctctcactgtcacccggtaaa

SEQ ID NO: 1239 - DNA, 801 bp, synthetic construct
  misc_feature 1..801: note = LAG3 117-156-Fc polynucleotide
  source 1..801: mol_type = other DNA
ctggatgaaaggggcagacaaagaggtgatttcagtctttggttgaggcctgcaagaagggccgatgcaggagagtatagggcagcagtgcaccttagagatcgggagcctaagtcctgcgataagacacacacatgcccaccatgccccgcccctgaattgctgggtggaccatctgtgttccttttcccgccaaaaccaaaagatactttgatgatttcaaggaccccagaggtcacctgcgtggtagtagacgtgagccacgaggacccggaagtgaagttcaactggtacgtggacggcgtggaagttcataacgcaaagacaaagcctagagaagaacagtataactctacgtacagagtagtatccgttctgaccgtgctgcaccaggattggttgaacggcaaggagtacaaatgcaaggtcagtaacaaggccctgccagccccaatcgaaaagaccatcagtaaggctaaggggcagcctagggaacctcaggtgtataccctgccacctagccgagatgagctgacaaagaatcaggtttccctgacttgcttggtaaagggcttttacccttctgacatcgccgtcgagtgggaaagtaacggacaaccagagaacaattacaaaaccacccctcctgtgctggacagtgatggatctttcttcttgtactcaaaactgacagtggacaagagtcgctggcagcagggtaatgtgttttcatgctctgtgatgcacgaagcattgcacaaccactacacgcagaagtccctgagcctcagcccagggaaa

SEQ ID NO: 1240 - DNA, 801 bp, synthetic construct
  misc_feature 1..801: note = LAG3 127-161-Fc polynucleotide
  source 1..801: mol_type = other DNA
agacaaagaggtgatttctctctctggctgagaccagcccgaagagctgacgctggggagtacagagccgctgtgcatctcagagacagggccctgtcttgtcgcgagcctaaaagctgcgataagacacacacatgtccaccatgtccagcccctgaactgctgggagggccaagtgtctttttgtttccccccaagccaaaagacaccctgatgatctcacggacaccagaggtgacttgtgtcgttgttgatgtctcccacgaagatcctgaagtcaagttcaactggtacgtagatggcgtagaggtacataacgccaagaccaaacctcgcgaggaacagtataattctacctacagagtggtttcagtgctgactgtgttgcatcaggattggttgaatggcaaggagtataagtgtaaagtgagcaataaggccctgcctgcaccaatcgagaagactatcagtaaggcaaagggacagcctcgagaaccccaggtttataccctgcctcccagtagggacgagctcacaaagaatcaggtgtctttgacctgtttggttaagggattctacccctccgatatcgcagtcgagtgggagtccaacggtcagcccgagaataactacaagactacccctccggtactggattccgacgggagcttctttctgtactccaagcttaccgtcgacaaatccaggtggcagcagggcaacgtattttcctgctccgtgatgcacgaggctctgcataatcactacactcagaaatcactgagcctgagcccaggcaag

SEQ ID NO: 1241 - DNA, 786 bp, synthetic construct
  misc_feature 1..786: note = LAG3 132-161-Fc polynucleotide
  source 1..786: mol_type = other DNA
ttctctttgtggctgagaccagcaagaagggctgacgcaggagaatacagagcagctgtccatctgagggaccgggcactgtcttgtagagaacccaagagctgcgacaagacacacacttgtcccccttgtcctgcaccagagctgttgggaggcccatctgtgtttctgttccctcctaagcctaaggataccctcatgatcagcaggacccctgaagtgacctgcgtggtagttgatgtctctcacgaggaccccgaagtcaagttcaactggtatgtcgacggagtggaggtccacaatgccaaaacgaagccgagggaagagcagtacaattccacatatcgagtggtttccgtgttgacagtcctgcatcaagactggctgaacggtaaagagtataagtgtaaggtgagtaacaaggccctgcctgcccccatcgagaagaccatcagcaaggcaaaggggcagcctagagaacctcaggtttacacactccccccgtctcgagacgaactgaccaagaaccaggtgagtctgacatgccttgtcaaaggcttctaccccagcgatatcgcagtggagtgggagtctaatggtcagcctgagaataactacaagacaacgccaccggttttggactccgatggatcttttttcttgtattctaaactcacagtggataagtctagatggcagcagggtaacgtcttttcttgcagtgttatgcacgaggcactgcacaatcattacacccagaagtctctttccttgtccccagggaaa

SEQ ID NO: 1242 - DNA, 789 bp, synthetic construct
  misc_feature 1..789: note = LAG3 137-167-Fc polynucleotide
  source 1..789: mol_type = other DNA
agacctgcaagaagagctgatgctggcgagtatagagctgccgtacatcttagggatagggccctcagctgcaggctcaggctgagattgggcgagcccaaatcctgtgataaaacacatacttgcccaccttgcccggctccggaattgttgggcggaccttcagtgttcctcttccccccgaagcctaaggacaccctgatgatctctagaactcctgaagtgacatgtgtggtggtggatgtgtcccatgaggacccggaggtgaagtttaattggtatgtagatggcgtggaagtccataatgcaaaaactaagcccagggaggagcagtacaactccacgtacagagtcgtgtccgtgttgactgtcctgcaccaggattggctgaatgggaaggagtacaaatgtaaggtgtccaataaagctctccccgctcctattgaaaaaactattagtaaagctaagggccagccaagggagccacaagtctatacactccccccgagtagggatgagttgacaaaaaatcaggtcagtctgacatgtctcgtcaaaggcttctacccctccgacattgcagtagaatgggaatctaacggacagccagagaacaactataaaactactccccctgtgctcgattcagatggcagtttcttcctctactccaagttgaccgtagataaatctaggtggcagcagggcaacgtctttagctgtagtgtgatgcacgaggccctgcacaatcactacacccagaagagcctctctctgagtccaggcaag

SEQ ID NO: 1243 - DNA, 1587 bp, synthetic construct
  misc_feature 1..1587: note = hLAG3 R97E 97-156-sugemalimab heavy chain polynucleotide
  source 1..1587: mol_type = other DNA
gaaaggtatactgttctgagcgtcgggcctggagggttgagatctggcagactgcctctgcaacctagagtccagctcgatgaacgaggcaggcagagaggcgacttctctctttggctcagacccgcaagaagagcagatgcaggagagtacagagctgctgttcacttgagggatagaggagggggcggatctggaggaggtggttcaggaggtggaggctcaggtggtggcggttcaggagaggtccagttgctggaaagcggaggaggccttgttcagccaggaggttcacttaggctgtcttgcgccgctagcggttttactttctccagttacgcaatgtcctgggtgagacaggcaccaggcaaagggctggagtgggttagtgggatttctggcagcggaggatttacatattacgccgattccgtgaaggggaggtttactatttcaagagacaattccaagaacaccctgtatctgcagatgaacagtctgagggcagaggacacagctgtgtactactgtgccaagccccctagaggctataactatggtccttttgattactggggacaaggaactctcgtcacagtgagcagcgcatccacaaaggggccatcagtgttcccattggctccttgttcacgcagcacaagcgagagtaccgctgcgctcggttgtttggtaaaggattatttccccgagcccgtgaccgttagttggaattcaggcgcgctgacttccggagtgcacacctttcccgctgtactgcagtcctcagggttgtactcacttagttccgtcgtcacagtcccatcttctagcctgggaacaaaaacgtatacctgtaacgtggaccataagcctagcaacactaaggtggataaacgcgtggaaagcaagtacggtcctccctgtcctccttgtccagccccagaattccttggtggcccatccgtgttcctctttcccccaaagccaaaggacacccttatgatatcccggacccccgaagtaacctgcgtggttgtggacgtgtcacaagaagatccagaggtgcagttcaactggtatgtggatggcgtagaagtccacaatgcaaagacaaaacccagggaggagcaatttaactcaacttatagggtggtttctgtgctgaccgtcctgcaccaggactggctgaatggcaaagagtataaatgcaaagtcagcaacaagggactgccatcctccatagaaaagacaatcagcaaggctaaaggacagcctcgggaaccgcaagtttatactctgcctccaagccaggaggagatgactaagaaccaggtatctttgacatgcctcgtgaagggtttctaccccagcgatattgcagtggaatgggaatctaacggccaacctgagaataattataaaaccacacctcctgtcctcgactccgacggctctttttttctgtattcacggctgacagtcgacaagtctcgatggcaggaggggaatgtatttagctgctctgtgatgcacgaggccctccacaatcactacacccaaaagagcctctcccttagcctggggaaa

SEQ ID NO: 1244 - DNA, 642 bp, synthetic construct
  misc_feature 1..642: note = hLAG3 112-156-sugemalimab heavy chain polynucleotide
  source 1..642: mol_type = other DNA
tcttacgttctcactcaacctccctcagttagtgtcgctcctggccagacagcaaggatcacatgtggaggtaacaacattgggtctaaaagcgtgcactggtatcagcagaaaccaggtcaggcacccgtgctggtcgtttatgatgacagcgacaggccaagtggcattcctgaaaggttctctggaagcaacagcgggaacaccgctacccttaccatttccagggtggaggccggtgacgaagccgattactattgtcaggtttgggacagctcctctgatcacgtagtctttggaggagggaccaagcttactgtactggggcagcctaaggcagctccctcagtgacactgttccccccatcaagcgaggagttgcaggcaaacaaagccaccctggtttgcctcatctcagacttctatccaggagcagtgaccgtggcttggaaggcagatagtagtcccgttaaagcgggcgtggaaaccacgacacccagtaaacagagcaataataagtacgcagcttcttcctatttgtctctcacacctgagcagtggaagtcccacagatcatactcctgccaggtgactcatgagggctcaactgtggagaaaaccgtggctccaacagaatgcagc

SEQ ID NO: 1245 - DNA, 1512 bp, synthetic construct
  misc_feature 1..1512: note = hLAG3 122-156-sugemalimab heavy chain polynucleotide
  source 1..1512: mol_type = other DNA
ctggatgaaagagggagacagaggggggatttttctctctggcttagaccagctagaagggcagacgccggagagtatagggctgcggtgcatttgagagatagaggaggtggtggatcaggtggaggaggttctggcggtgggggaagtggtggtggaggtagtggagaggtgcagttgctggagagcggcggaggattggtacagccaggaggcagcttgagactgagctgcgccgcttctgggttcactttttcatcatacgcaatgtcctgggttagacaggccccaggcaaaggcctcgaatgggtgtcaggcattagcggctctgggggatttacatactatgccgacagtgtgaagggccgattcactattagcagggataactctaagaacacactctatctgcagatgaacagtctcagagccgaggacactgctgtttactactgtgccaaacctccccgaggatacaattatggtcccttcgattattggggacagggtaccctggtcaccgtgtcaagcgcatctacgaaaggcccaagtgtatttccactggctccatgcagccggtctacatcagagtctacagccgctcttggatgcctggtaaaggactatttccccgagcccgtaactgtgtcatggaatagcggcgccctgacttccggagtacacacatttcccgcagtcctccagtctagcggcctgtactctctgtcctctgtcgtgaccgtcccaagttcttctcttggcaccaagacatatacatgcaacgttgaccacaagccaagtaatacgaaagtcgacaaacgcgtcgaaagtaaatatggaccaccttgtcctccatgtccagccccagagttcttgggaggcccaagtgtgtttctgttccctccaaagccaaaagataccctcatgattagccggacaccggaggttacatgcgtggtggtggacgtcagccaggaggaccctgaagttcaattcaactggtatgtcgacggggttgaggtgcacaacgctaaaactaagccacgcgaggaacagttcaactccacgtatcgcgtggtctccgtgcttaccgttctgcaccaggattggctgaatgggaaagagtacaagtgcaaggtatctaacaaaggcctcccctcttccatcgagaagaccatctctaaagccaagggacagccacgggaacctcaggtttacactctccccccctcccaagaagagatgactaagaaccaggtgagtcttacatgtctggtgaagggcttctacccttccgatatcgccgtggagtgggagtccaatggacaacccgaaaataactacaagacaactcctcctgttttggatagtgacggctcattttttctgtactcacgcctcacggttgacaagtcaaggtggcaggagggaaatgtcttttcctgctctgtaatgcacgaagcgttgcataatcactacactcagaaatccctgagcctgtccctgggcaaa

SEQ ID NO: 1246 - DNA, 1602 bp, synthetic construct
  misc_feature 1..1602: note = hLAG3 R97E 97-161-sugemalimab heavy chain polynucleotide
  source 1..1602: mol_type = other DNA
gaacggtatacagtcctgtcagtgggcccaggtggtcttagaagtggcagacttcctctccagcccagggtccagctcgatgagagaggaagacagcgcggtgattttagcctgtggttgcggccagccagaagagcagatgccggggaatacagggcagctgtccatctccgagacagagcactttcttgcagaggaggaggaggctctggaggaggaggtagtggaggagggggaagtggaggtggcggtagtggtgaagtgcagcttctcgagagcggtggaggccttgttcaacctggaggctctctcagactgtcttgtgccgcaagcggtttcaccttctcaagctacgctatgagctgggtgaggcaagctcccggcaaaggattggaatgggttagcggtatatctggatctgggggatttacatattatgccgactcagtcaaagggagattcaccatttcacgagataacagcaagaacaccctctaccttcagatgaacagtctgagggcagaggataccgctgtctactattgtgccaaacctccgcgcggttataactatggcccgtttgattactgggggcagggtactctggtgacggtgagttccgcctccactaaggggccatctgtgttcccactggcaccttgtagcaggagtaccagcgagtccactgcagctctgggctgccttgtgaaggattatttcccagagcctgtgaccgtgagttggaactcaggagctcttacctcaggcgtccataccttccctgctgtgctgcagtccagtggcctttatagtctgagctctgtggtcaccgtgccctcttctagtctcggaactaagacatacacatgtaacgtagaccacaaaccctccaataccaaggtcgacaagagggtggaatccaaatacggacccccatgtcccccttgtcctgctcctgagtttctgggaggacctagcgtgtttctctttcccccaaagcctaaggatacattgatgattagcaggacccctgaagtcacttgcgttgtggtggacgtgagccaggaagacccagaagtacagtttaattggtatgtcgatggcgtggaagtgcacaatgccaagaccaagcctcgcgaagaacagttcaattcaacctacagggtagtgtccgtcctgacagtgcttcaccaggactggttgaacggaaaggagtacaagtgcaaagtgtccaataaaggcctgccctcctccatcgagaaaacgatcagtaaggcaaagggccagcctcgagagccacaggtatatacactgccaccgagccaggaagagatgacaaagaatcaggtctctctgacctgtctggtcaagggattctacccctccgacattgcagtcgagtgggagagtaacggccagcctgaaaataactacaaaaccactcccccagtgctggactccgatgggtctttctttctctatagcaggctgacggtggataaatctaggtggcaagaggggaacgtcttctcatgttctgtcatgcatgaggccctgcataaccactacactcagaagagtttgtccctgagcctcggaaaa

SEQ ID NO: 1247 - DNA, 1980 bp, synthetic construct
  misc_feature 1..1980: note = hLAG3 R97E 97-156-sugemalimab heavy chain -CD86 IgV polynucleotide
  source 1..1980: mol_type = other DNA
gaaaggtatacagtgttgtctgttggtcctgggggcctgagatctggccgcttgcccctgcagccacgagtgcaattggatgagcgcgggcggcagagaggggacttttctctgtggcttcgacccgcacgacgcgctgacgcaggcgagtacagggccgccgtgcatctgcgggatcgggggggcgggggcgggtctggaggcggggggtcagggggcggtggatcaggggggggtggaagtggtgaagtgcagctgcttgagtccggcgggggattggttcaacctggaggatcactgcggctgtcctgtgctgcaagcggatttacatttagctcttatgccatgtcctgggtgaggcaagcgcccggtaaggggctggaatgggttagcggcatttcaggcagtgggggcttcacctactacgcagactctgttaaggggagatttaccatcagtagggataactcaaagaacacattgtatctccagatgaatagcctgagggccgaagacactgccgtgtactattgcgcgaaaccccctagggggtataattatggaccgtttgattactggggccaaggcactctcgtgacagtttccagcgcaagcactaaagggccctccgtgtttccacttgcgccctgtagcagaagcacctctgaatctacagccgccctgggctgtctggttaaagattactttccggaacccgtgactgtctcctggaatagtggtgctctgacctccggcgtccatactttccctgcagtgctgcaaagttccggcctttactccttgtccagtgtggtgactgttcccagcagcagcctgggtactaagacttatacgtgtaacgtggaccataagccttcaaacactaaggtagataaacgcgtggagagtaagtatggaccaccatgtcccccgtgccccgcaccggagtttctgggcggcccctctgtctttctgttcccacctaagccaaaagacacacttatgattagcagaacccccgaagtgacttgtgtcgtggttgacgtgtcccaggaggacccagaggttcagtttaactggtatgtcgatggcgttgaggttcataatgcgaaaacaaagcctcgggaagaacaatttaacagcacctatcgagtagtgtccgtcttgacagtgctgcaccaggactggctcaatgggaaagaatacaagtgcaaagtttccaataaggggttgccctcctccatcgaaaaaaccatttccaaggcaaaaggtcagccccgagaacctcaggtgtatacactgcctccttcacaggaagagatgaccaaaaatcaggtctctcttacctgtctggttaaagggttctatcctagcgacatcgctgtggagtgggagagcaatggtcaacccgagaataactataagactacaccacctgtactggacagtgacggttccttttttctgtattctcggctcaccgttgataaatcaagatggcaggaaggcaacgtgttctcttgcagtgtgatgcacgaggccttgcacaaccactatactcaaaagtccctgtctctgtctctgggtgctggaggagggggaggaagtggtggcggggggagcggaggcggtggttctggaggcggcggcgcgcctctcaaaatccaggcctacttcaacgagactgccgacctgccctgtcagttcgctaattcccagaatcaatcactttccgaactggtggtgttctggcaggatcaggaaaatctcgtccttaatgaggtgtatctcggcaaggagaagttcgactctgtgcattctaagtacatgggcagaacctcctttgatagcgattcatggaccctccgccttcataatctccagatcaaggacaagggactgtaccagtgtattattcatcacaaaaagcctaccggcatgatccgcattcatcagatgaactctgaactgtcagtgttg

SEQ ID NO: 1248 - DNA, 1995 bp, synthetic construct
  misc_feature 1..1995: note = hLAG3 R97E 97-161-sugemalimab heavy chain -CD86 IgV polynucleotide
  source 1..1995: mol_type = other DNA
gaacgctatacagtactttctgttggccctgggggtttgaggagcgggaggttgcccctgcagccacgggttcagctggatgagaggggtagacagaggggggattttagtctgtggctgcggccggcacgacgagccgacgcaggggaataccgcgccgccgtgcatcttcgggaccgggccctgtcctgccggggtggtggcggcggcagcggaggaggcggtagcggtggaggaggtagcgggggcggcggcagtggcgaagtccagctgcttgaaagcgggggcggcctggtgcagcccggcgggagcctgaggctgagctgtgcagcctccggcttcacattctcctcatatgccatgtcatgggtacgccaggcccctggaaaaggactggagtgggtttctggcatatccgggtctggaggcttcacctactacgcagattctgtcaagggaaggtttaccatatccagagacaactctaagaacactctgtacctgcagatgaacagccttagagcagaagacaccgccgtgtattattgcgcgaaaccaccgcggggctataattacgggccgtttgactattggggacagggaacactcgttacagtgtcttccgcatccaccaaaggcccctccgtgttcccactggctccgtgttcacgctcaacctccgaatctaccgcagccttgggatgcctggtgaaggactatttccctgaaccggtgacagtttcctggaattcaggagccctcaccagtggcgtacacacatttcccgcagtgctgcagtcctccggcctttatagccttagctctgtcgtgacagttcccagtagttccctggggacaaagacttatacctgcaatgtcgatcataagccatctaacacaaaagtggacaaacgggttgaatctaaatacggccccccatgcccaccctgtcctgctcctgagttcctcgggggaccatccgtgttcctgttcccaccgaaacctaaagacaccctcatgatctcccgcacccccgaagtgacatgcgtggtggtcgatgtgtctcaggaggatcccgaagtccaattcaattggtacgtggatggcgtcgaagttcacaatgcaaaaaccaagccccgagaagagcagtttaattcaacttatagggtggtgtctgtgctgaccgtactccatcaggactggctcaatggcaaggaatacaaatgtaaagtgtctaacaagggcctcccttcctctattgagaaaaccatcagcaaggctaagggccagcctagggagccacaggtgtacactctgccaccttcccaggaagaaatgaccaaaaaccaagtgtcactcacctgcttggtgaagggattctaccccagcgacatcgctgtggaatgggagtctaatgggcagcccgagaacaattataagacgactccaccagtattggacagtgacggttccttctttctgtacagtcggctgacagtggataagtcaagatggcaggaaggaaacgttttttcttgctctgtgatgcatgaagccctgcataaccactacactcagaagagcctgtcactttccctgggcgcagggggcgggggtggcagtggcggcggcggcagcggtggtggcggttctgggggaggaggtgcccccttgaaaattcaagcatacttcaatgaaacggccgacttgccatgtcagtttgcgaatagccagaatcagagcctgtctgaactggtggttttttggcaggatcaggaaaaccttgtgctgaacgaagtctaccttggtaaggagaagttcgactccgtgcatagtaaatatatgggcagaacgagttttgactctgattcctggactttgagactgcataatttgcagatcaaggacaagggtttgtatcagtgcattatccaccacaagaagccaactggtatgatcagaattcaccaaatgaacagtgaactctctgtcctg

SEQ ID NO: 1249 - protein, 660 aa, synthetic construct
  REGION 1..660: note = LAG3 R97E 97-156-sugemalimab antibody heavy chain -CD86 IgV-Q25I
ERYTVLSVGPGGLRSGRLPLQPRVQLDERGRQRGDFSLWLRPARRADAGEYRAAVHLRDRGGGGSGGGGSGGGGSGGGGSGEVQLLESGGGLVQPGGSLRLSCAASGFTFSSYAMSWVRQAPGKGLEWVSGISGSGGFTYYADSVKGRFTISRDNSKNTLYLQMNSLRAEDTAVYYCAKPPRGYNYGPFDYWGQGTLVTVSSASTKGPSVFPLAPCSRSTSESTAALGCLVKDYFPEPVTVSWNSGALTSGVHTFPAVLQSSGLYSLSSVVTVPSSSLGTKTYTCNVDHKPSNTKVDKRVESKYGPPCPPCPAPEFLGGPSVFLFPPKPKDTLMISRTPEVTCVVVDVSQEDPEVQFNWYVDGVEVHNAKTKPREEQFNSTYRVVSVLTVLHQDWLNGKEYKCKVSNKGLPSSIEKTISKAKGQPREPQVYTLPPSQEEMTKNQVSLTCLVKGFYPSDIAVEWESNGQPENNYKTTPPVLDSDGSFFLYSRLTVDKSRWQEGNVFSCSVMHEALHNHYTQKSLSLSLGAGGGGSGGGGSGGGGSGGGGSGAPLKIQAYFNETADLPCQFANSQNISLSELVVFWQDQENLVLNEVYLGKEKFDSVHSKYMGRTSFDSDSWTLRLHNLQIKDKGLYQCIIHHKKPTGMIRIHQMNSELSVL

SEQ ID NO: 1250 - DNA, 1980 bp, synthetic construct
  misc_feature 1..1980: note = LAG3 R97E 97-156-sugemalimab antibody heavy chain -CD86 IgV-Q25I polynucleotide
  source 1..1980: mol_type = other DNA
gaacgctatactgttctgagtgtaggtcccggaggattgcgctctggacgactgccacttcagcccagggttcagttggacgagaggggaaggcaaagaggggacttctctctctggctgaggcctgccagaagagcggatgctggggaatatagggcagcagtgcatctgagagacagaggtggtggaggcagtggtggtggaggttccggtggtggcggttctggaggaggaggaagtggagaagtgcagctgttggagtctggaggcggattggtacagcccgggggaagtctgaggctctcctgtgcagccagtggctttactttctccagctacgccatgtcatgggtaaggcaggcaccaggaaaaggacttgagtgggtgtccgggatcagtgggagtgggggatttacatattacgccgactccgtcaaggggcgattcacaatttctcgcgacaattctaagaatacattgtatctgcagatgaacagccttagagctgaggataccgccgtgtattactgtgctaagccccctcgcggctacaactatggaccgtttgactactgggggcagggcacacttgtgactgtgtcttctgcctccactaaggggcccagcgtatttcctctcgccccttgcagtcggtcaacatctgaatcaaccgcagctctggggtgtctggtcaaggactacttcccagagcccgtgaccgtgtcctggaatagcggcgctctgacatctggtgtacatactttcccagctgtcctgcagagcagcgggctctacagcttgagcagcgtggtgactgtcccctcctcctccctcggaactaagacctatacatgtaacgttgaccacaaacccagcaatacaaaagtggataagagggtagaatctaaatatgggccgccttgtcctccttgtcctgcaccagagtttctgggcggaccaagtgtatttctgtttccccccaagcctaaagacactctgatgatttctagaactccagaagtcacctgcgttgtcgtagacgtctctcaggaggaccccgaagtccagtttaactggtacgtcgatggagttgaggtacacaacgccaagaccaagcctagggaggagcaattcaatagcacctacagagtcgtctctgtgctgactgtacttcatcaggactggctgaatggtaaagaatacaagtgtaaggtgtctaataagggcctgccttcctctatagaaaagaccatctccaaggccaagggacagcctagagaaccacaggtttatactctgccgccgtcccaagaggaaatgacaaagaaccaagtttcattgacatgcctggtcaagggcttctatcccagtgacattgcagtggagtgggaaagtaacggccagcccgagaacaactacaagactacccccccagtccttgattccgatggatcatttttcctctacagcagactcactgtcgataaaagccgatggcaggagggtaatgtctttagctgttccgtcatgcacgaggcacttcataatcattatacccagaagagcttgtctctttcactcggagcaggaggaggaggatccggaggtggtggctcaggaggaggaggatctggtggaggaggatctggagcacctctcaaaatccaggcgtacttcaacgagacggctgacctcccgtgtcagttcgccaatagccagaatataagtctgagtgaactggtggtgttctggcaggaccaggaaaaccttgtcctgaacgaagtgtacctcgggaaagagaaattcgattctgtgcactctaagtatatgggcaggacctccttcgatagcgattcttggactctgcggctgcacaatctgcagatcaaggacaaggggctctaccagtgtattattcaccataagaaaccgacaggcatgatcagaatccaccagatgaatagcgagctgtccgtgttg

SEQ ID NO: 1251 - protein, 660 aa, synthetic construct
  REGION 1..660: note = LAG3 R97E 97-156-sugemalimab antibody heavy chain -CD86 IgV-H90I
ERYTVLSVGPGGLRSGRLPLQPRVQLDERGRQRGDFSLWLRPARRADAGEYRAAVHLRDRGGGGSGGGGSGGGGSGGGGSGEVQLLESGGGLVQPGGSLRLSCAASGFTFSSYAMSWVRQAPGKGLEWVSGISGSGGFTYYADSVKGRFTISRDNSKNTLYLQMNSLRAEDTAVYYCAKPPRGYNYGPFDYWGQGTLVTVSSASTKGPSVFPLAPCSRSTSESTAALGCLVKDYFPEPVTVSWNSGALTSGVHTFPAVLQSSGLYSLSSVVTVPSSSLGTKTYTCNVDHKPSNTKVDKRVESKYGPPCPPCPAPEFLGGPSVFLFPPKPKDTLMISRTPEVTCVVVDVSQEDPEVQFNWYVDGVEVHNAKTKPREEQFNSTYRVVSVLTVLHQDWLNGKEYKCKVSNKGLPSSIEKTISKAKGQPREPQVYTLPPSQEEMTKNQVSLTCLVKGFYPSDIAVEWESNGQPENNYKTTPPVLDSDGSFFLYSRLTVDKSRWQEGNVFSCSVMHEALHNHYTQKSLSLSLGAGGGGSGGGGSGGGGSGGGGSGAPLKIQAYFNETADLPCQFANSQNQSLSELVVFWQDQENLVLNEVYLGKEKFDSVHSKYMGRTSFDSDSWTLRLHNLQIKDKGLYQCIIIHKKPTGMIRIHQMNSELSVL

SEQ ID NO: 1252 - DNA, 1980 bp, synthetic construct
  misc_feature 1..1980: note = LAG3 R97E 97-156-sugemalimab antibody heavy chain -CD86 IgV-H90I polynucleotide
  source 1..1980: mol_type = other DNA
gaaagatatacagtgttgagcgtcggccccggagggttgagatctggtagattgccgctgcaacctcgcgttcagttggacgagcggggaaggcagcgaggagacttctctctgtggttgaggcccgccagaagagccgatgctggcgaatacagggccgctgtgcatttgagggatagaggcggtggtggttcaggaggaggaggtagtggcggaggcggaagtggaggtggaggttctggtgaggtgcaattgttggagtctggtggaggccttgtgcaaccgggtggctcattgcgactctcttgtgctgcgtccgggttcacattttcatcctatgcaatgtcctgggtgaggcaagcacctggcaaaggtctcgagtgggtgtctggaatcagcggctcaggggggtttacatactacgctgactctgtgaaggggcgcttcactatctccagagataattcaaagaataccttgtacctccagatgaattctctccgagctgaagacactgctgtctattactgtgcaaaaccgccacgcggctataattacggtccattcgactactggggccaggggacattggtgacagtgtcttctgccagcactaaaggacctagcgttttcccccttgcaccatgcagtagatctacttctgaaagcacggccgccttgggctgcttggtgaaggactattttccagaacctgtgactgtgagctggaacagcggagctctgacatctggggtccacacctttccagcagtgttgcagtcttccggactttactcactgtcttcagttgtcacggttccatccagttccctggggacaaagacatacacctgtaacgtcgatcataaaccatcaaatacaaaagtcgacaagagggtcgagagcaaatatggcccaccctgtccaccatgtccagctccagagtttctgggaggacccagtgtcttccttttcccaccaaagccaaaagataccctcatgatctccagaacacctgaggtgacttgtgttgtcgtcgatgtgtctcaggaagatcctgaagtacaatttaactggtatgtggacggcgtggaagtccataatgccaagacaaagccaagggaggagcagtttaattctacctatcgagttgtctccgtcctgaccgtcttgcaccaggactggctgaacgggaaagagtataagtgcaaagtttccaataaggggctccctagttctatcgagaaaacaatcagtaaggctaagggccagccaagggaaccgcaggtgtacactctccctccctcccaggaagagatgacgaaaaatcaagtaagcctcacctgcctcgtgaaagggttctaccctagtgacatcgcagttgagtgggagagtaatggccaacctgaaaacaactataaaacaacacccccagtgctggattcagatggcagctttttcctctatagcagattgacagtggacaaatcaaggtggcaggagggaaatgtgttttcttgctctgttatgcacgaagcattgcataatcattatacacagaagagccttagtctgtctttgggagctggagggggtggatctggtggaggaggtagtggtggtggggggtcaggtggaggtggatctggagcacctctgaagatacaagcttattttaacgagactgccgatcttccatgccagtttgcaaacagccagaatcaatcactgtctgagctggtggttttttggcaagaccaggagaatctcgtgttgaatgaggtatacctgggcaaagagaagttcgactcagtgcacagcaagtatatgggccggacatcatttgattccgattcctggaccttgcggcttcacaacctgcagataaaagataagggcctgtaccagtgcatcatcatccacaagaagcccaccggcatgatccgcattcatcaaatgaacagcgaacttagtgtcctc

SEQ ID NO: 1253 - protein, 660 aa, synthetic construct
  REGION 1..660: note = LAG3 97-156-sugemalimab antibody heavy chain -CD86 IgV-Q25I
RRYTVLSVGPGGLRSGRLPLQPRVQLDERGRQRGDFSLWLRPARRADAGEYRAAVHLRDRGGGGSGGGGSGGGGSGGGGSGEVQLLESGGGLVQPGGSLRLSCAASGFTFSSYAMSWVRQAPGKGLEWVSGISGSGGFTYYADSVKGRFTISRDNSKNTLYLQMNSLRAEDTAVYYCAKPPRGYNYGPFDYWGQGTLVTVSSASTKGPSVFPLAPCSRSTSESTAALGCLVKDYFPEPVTVSWNSGALTSGVHTFPAVLQSSGLYSLSSVVTVPSSSLGTKTYTCNVDHKPSNTKVDKRVESKYGPPCPPCPAPEFLGGPSVFLFPPKPKDTLMISRTPEVTCVVVDVSQEDPEVQFNWYVDGVEVHNAKTKPREEQFNSTYRVVSVLTVLHQDWLNGKEYKCKVSNKGLPSSIEKTISKAKGQPREPQVYTLPPSQEEMTKNQVSLTCLVKGFYPSDIAVEWESNGQPENNYKTTPPVLDSDGSFFLYSRLTVDKSRWQEGNVFSCSVMHEALHNHYTQKSLSLSLGAGGGGSGGGGSGGGGSGGGGSGAPLKIQAYFNETADLPCQFANSQNISLSELVVFWQDQENLVLNEVYLGKEKFDSVHSKYMGRTSFDSDSWTLRLHNLQIKDKGLYQCIIHHKKPTGMIRIHQMNSELSVL

SEQ ID NO: 1254 - DNA, 1980 bp, synthetic construct
  misc_feature 1..1980: note = LAG3 97-156-sugemalimab antibody heavy chain -CD86 IgV-Q25I polynucleotide
  source 1..1980: mol_type = other DNA
aggagatatactgtgttgagcgttggacctggaggcttgcgctctggtagacttccgctgcaaccaagagtgcaactggatgaacgaggtaggcagcggggggacttttccctttggttgagacctgctagaagggccgacgcaggagaatatcgcgcagcagtccatttgcgagatagaggaggtggaggatcaggaggaggtggcagtggtggaggaggatcaggtggaggaggctcaggggaagttcagttgctggaatcaggcggcggtcttgttcagccaggaggcagtctgagactgtcctgcgcagccagcggatttacattttccagctatgccatgtcatgggtacgccaggctccaggaaaaggcctggagtgggtctctggaatcagtggatcaggcggttttacatactatgctgactctgtcaagggaagatttactatctctagagataacagcaagaacacactttacttgcagatgaattcactgcgcgcagaagataccgcagtctattactgtgcaaaacctccacgcggctacaactatggccccttcgattattgggggcagggaaccctggtaacagtttctagcgccagtactaaggggccttctgtcttcccacttgcaccttgttctcggagtacttctgaaagtaccgccgccttgggatgcctcgtgaaggactatttcccagaacccgtgaccgtgtcttggaactcaggtgctctgaccagcggagtgcacactttccccgccgtacttcaatcatctggcctgtactccctgagctcagtggtgaccgtccccagcagttctctcggcacaaagacttatacatgtaacgttgatcacaaaccctcaaacaccaaggttgataagagagtggaaagcaagtatggaccaccatgtcccccctgtcctgcaccagagtttctgggagggccaagcgtgttcttgttcccgccaaagcccaaggacacgctcatgatttcacggaccccagaagtcacctgcgtcgtggttgacgtctctcaggaggaccccgaggtgcagttcaactggtatgtggatggagtggaagtgcacaatgccaaaacaaaaccgcgggaggagcagttcaactctacatatcgggtggtatccgtactcactgtcctgcaccaagactggttgaacggaaaggagtataagtgtaaggttagcaacaaaggcctgccctcttcaatcgaaaagactataagcaaagccaaaggccaacccagggaaccacaggtgtacacactgccccccagtcaggaagagatgactaaaaaccaggtgagcttgacctgtctcgtgaagggcttctacccctccgacatcgccgtggaatgggagagtaatggacagccagagaataactacaagactacacctcctgttctggactcagacggtagctttttcctgtatagtcgcctgaccgtcgataaatctcggtggcaggagggaaatgtgtttagctgtagtgtaatgcatgaagctcttcataatcattacactcagaagagcctgtctctttctttgggtgctggaggaggtggatctggtggtggtggatctggaggaggtggaagtggaggtgggggcagtggtgctccattgaagatacaagcttatttcaacgaaaccgccgatctgccgtgccaattcgctaattcccagaacatctctttgagcgaactggtggtgttctggcaggaccaggaaaatctggtgcttaatgaagtgtatctgggcaaggagaagttcgactccgtgcattccaagtacatgggtagaacttctttcgactcagatagctggactctccggctgcacaacctccagatcaaagataaaggactgtatcagtgtataattcatcacaagaagcctaccggcatgatccggattcaccagatgaattccgagctgtcagtcctg

SEQ ID NO: 1255 - protein, 660 aa, synthetic construct
  REGION 1..660: note = LAG3 97-156-sugemalimab antibody heavy chain -CD86 IgV-H90I
RRYTVLSVGPGGLRSGRLPLQPRVQLDERGRQRGDFSLWLRPARRADAGEYRAAVHLRDRGGGGSGGGGSGGGGSGGGGSGEVQLLESGGGLVQPGGSLRLSCAASGFTFSSYAMSWVRQAPGKGLEWVSGISGSGGFTYYADSVKGRFTISRDNSKNTLYLQMNSLRAEDTAVYYCAKPPRGYNYGPFDYWGQGTLVTVSSASTKGPSVFPLAPCSRSTSESTAALGCLVKDYFPEPVTVSWNSGALTSGVHTFPAVLQSSGLYSLSSVVTVPSSSLGTKTYTCNVDHKPSNTKVDKRVESKYGPPCPPCPAPEFLGGPSVFLFPPKPKDTLMISRTPEVTCVVVDVSQEDPEVQFNWYVDGVEVHNAKTKPREEQFNSTYRVVSVLTVLHQDWLNGKEYKCKVSNKGLPSSIEKTISKAKGQPREPQVYTLPPSQEEMTKNQVSLTCLVKGFYPSDIAVEWESNGQPENNYKTTPPVLDSDGSFFLYSRLTVDKSRWQEGNVFSCSVMHEALHNHYTQKSLSLSLGAGGGGSGGGGSGGGGSGGGGSGAPLKIQAYFNETADLPCQFANSQNQSLSELVVFWQDQENLVLNEVYLGKEKFDSVHSKYMGRTSFDSDSWTLRLHNLQIKDKGLYQCIIIHKKPTGMIRIHQMNSELSVL

SEQ ID NO: 1256 - DNA, 1980 bp, synthetic construct
  misc_feature 1..1980: note = LAG3 97-156-sugemalimab antibody heavy chain -CD86 IgV-H90I polynucleotide
  source 1..1980: mol_type = other DNA
cgcagatatacggttttgagtgtggggccaggtggactcagatctggtagactcccccttcagcccagagtgcagctggatgagaggggaagacagcggggggatttctctctgtggcttagaccagctcggagagcagatgcaggggaatatagagctgccgttcatctgagggacagaggaggtggtggatcaggagggggaggttctggaggaggcggtagtggtggaggaggatctggagaagtgcagctgctcgagtctggaggcggacttgtgcaacctggtggaagtttgaggctctcctgtgccgcaagcgggtttacctttagtagttatgctatgtcatgggtgaggcaagccccaggcaagggactggaatgggtctccggaatctcaggatccggcggtttcacctattatgccgatagcgtgaaaggccgattcacaatcagcagagataatagtaaaaatactctgtacctgcagatgaacagccttcgggccgaggataccgccgtatactactgcgctaaacccccacgggggtataattacgggccctttgactattggggtcagggcacactggtcactgtttctagtgcttcaaccaagggtccctctgtgtttcctctggctccatgtagtcggagcacttctgagagcacagccgcgttgggttgcctggttaaggactattttccagaacctgtgactgtgagctggaacagcggagccttgacaagtggggtgcacacattcccagccgtgctccagtccagcggtctttacagtctctcaagcgtggtaactgttcctagcagtagtctgggaactaaaacatatacatgcaatgtggaccacaaacctagcaacactaaagtggacaagagagttgagtcaaagtatggaccaccttgtcctccttgccctgcccctgagttccttggaggacctagcgtttttttgttccctccgaagccgaaagataccctgatgatctccaggaccccagaggtgacctgcgtcgtggtagacgtttctcaagaagaccctgaggtgcaattcaattggtacgtagatggcgtcgaggttcataacgccaaaaccaaacctcgggaggagcaattcaactccacatacagagttgtcagtgtgttgacggtgctccatcaggattggctgaacgggaaggagtacaagtgtaaggtgtccaataaaggcttgcctagctcaatcgagaagaccatttcaaaagctaaggggcagccaagagagccccaggtttataccctgccccccagccaagaggaaatgaccaagaaccaggtgtccctgacatgcctcgtgaagggcttttacccctcagacattgccgtagagtgggaatcaaatggacagcctgaaaataactacaagacaacaccgcccgtgctcgactctgacggaagctttttcctgtacagccgcttgacagtagacaaatccagatggcaagagggcaatgtgttctcatgtagcgtcatgcacgaggccctccataatcattacacacaaaagagcttgagtctgtccttgggagctggaggtggtggatcagggggaggtggatctggaggcggtggttctggaggtgggggaagtggtgctcccctgaagatccaggcatactttaacgagaccgcagatctgccctgtcaattcgcaaactcacaaaatcaaagcttgtcagaacttgttgtgttctggcaagatcaggagaatctggtactgaacgaagtgtacctgggaaaggagaaattcgactcagtgcatagcaaatacatgggaagaactagtttcgactccgacagttggaccttgaggctgcataatctgcagatcaaggacaagggcttgtaccagtgcattatcatacacaagaagcccacgggaatgattcggatacatcaaatgaattccgagttgagtgtcctg

SEQ ID NO: 1257 - protein, 263 aa, synthetic construct
  REGION 1..263: note = LAG3 121-152-Fc
LDERGRQRGDFSLWLRPARRADAGEYRAAVHEPKSCDKTHTCPPCPAPELLGGPSVFLFPPKPKDTLMISRTPEVTCVVVDVSHEDPEVKFNWYVDGVEVHNAKTKPREEQYNSTYRVVSVLTVLHQDWLNGKEYKCKVSNKALPAPIEKTISKAKGQPREPQVYTLPPSRDELTKNQVSLTCLVKGFYPSDIAVEWESNGQPENNYKTTPPVLDSDGSFFLYSKLTVDKSRWQQGNVFSCSVMHEALHNHYTQKSLSLSPGK

SEQ ID NO: 1258 - protein, 259 aa, synthetic construct
  REGION 1..259: note = LAG3 130-156-Fc
GDFSLWLRPARRADAGEYRAAVHLRDREPKSCDKTHTCPPCPAPELLGGPSVFLFPPKPKDTLMISRTPEVTCVVVDVSHEDPEVKFNWYVDGVEVHNAKTKPREEQYNSTYRVVSVLTVLHQDWLNGKEYKCKVSNKALPAPIEKTISKAKGQPREPQVYTLPPSRDELTKNQVSLTCLVKGFYPSDIAVEWESNGQPENNYKTTPPVLDSDGSFFLYSKLTVDKSRWQQGNVFSCSVMHEALHNHYTQKSLSLSPGK

SEQ ID NO: 1259 - protein, 288 aa, synthetic construct
  REGION 1..288: note = LAG3 97-152-Fc
RRYTVLSVGPGGLRSGRLPLQPRVQLDERGRQRGDFSLWLRPARRADAGEYRAAVHEPKSCDKTHTCPPCPAPELLGGPSVFLFPPKPKDTLMISRTPEVTCVVVDVSHEDPEVKFNWYVDGVEVHNAKTKPREEQYNSTYRVVSVLTVLHQDWLNGKEYKCKVSNKALPAPIEKTISKAKGQPREPQVYTLPPSRDELTKNQVSLTCLVKGFYPSDIAVEWESNGQPENNYKTTPPVLDSDGSFFLYSKLTVDKSRWQQGNVFSCSVMHEALHNHYTQKSLSLSPGK

SEQ ID NO: 1260 - protein, 286 aa, synthetic construct
  REGION 1..286: note = LAG3 97-150-Fc
RRYTVLSVGPGGLRSGRLPLQPRVQLDERGRQRGDFSLWLRPARRADAGEYRAAEPKSCDKTHTCPPCPAPELLGGPSVFLFPPKPKDTLMISRTPEVTCVVVDVSHEDPEVKFNWYVDGVEVHNAKTKPREEQYNSTYRVVSVLTVLHQDWLNGKEYKCKVSNKALPAPIEKTISKAKGQPREPQVYTLPPSRDELTKNQVSLTCLVKGFYPSDIAVEWESNGQPENNYKTTPPVLDSDGSFFLYSKLTVDKSRWQQGNVFSCSVMHEALHNHYTQKSLSLSPGK

SEQ ID NO: 1261 - protein, 242 aa, synthetic construct
  REGION 1..242: note = LAG3 147-156-Fc
YRAAVHLRDREPKSCDKTHTCPPCPAPELLGGPSVFLFPPKPKDTLMISRTPEVTCVVVDVSHEDPEVKFNWYVDGVEVHNAKTKPREEQYNSTYRVVSVLTVLHQDWLNGKEYKCKVSNKALPAPIEKTISKAKGQPREPQVYTLPPSRDELTKNQVSLTCLVKGFYPSDIAVEWESNGQPENNYKTTPPVLDSDGSFFLYSKLTVDKSRWQQGNVFSCSVMHEALHNHYTQKSLSLSPGK

SEQ ID NO: 1262 - protein, 261 aa, synthetic construct
  REGION 1..261: note = LAG3 121-150-Fc
LDERGRQRGDFSLWLRPARRADAGEYRAAEPKSCDKTHTCPPCPAPELLGGPSVFLFPPKPKDTLMISRTPEVTCVVVDVSHEDPEVKFNWYVDGVEVHNAKTKPREEQYNSTYRVVSVLTVLHQDWLNGKEYKCKVSNKALPAPIEKTISKAKGQPREPQVYTLPPSRDELTKNQVSLTCLVKGFYPSDIAVEWESNGQPENNYKTTPPVLDSDGSFFLYSKLTVDKSRWQQGNVFSCSVMHEALHNHYTQKSLSLSPGK

SEQ ID NO: 1263 - protein, 257 aa, synthetic construct
  REGION 1..257: note = LAG3 122-146-Fc
LDERGRQRGDFSLWLRPARRADAGEEPKSCDKTHTCPPCPAPELLGGPSVFLFPPKPKDTLMISRTPEVTCVVVDVSHEDPEVKFNWYVDGVEVHNAKTKPREEQYNSTYRVVSVLTVLHQDWLNGKEYKCKVSNKALPAPIEKTISKAKGQPREPQVYTLPPSRDELTKNQVSLTCLVKGFYPSDIAVEWESNGQPENNYKTTPPVLDSDGSFFLYSKLTVDKSRWQQGNVFSCSVMHEALHNHYTQKSLSLSPGK

SEQ ID NO: 1264 - protein, 248 aa, synthetic construct
  REGION 1..248: note = LAG3 141-156-Fc
RADAGEYRAAVHLRDREPKSCDKTHTCPPCPAPELLGGPSVFLFPPKPKDTLMISRTPEVTCVVVDVSHEDPEVKFNWYVDGVEVHNAKTKPREEQYNSTYRVVSVLTVLHQDWLNGKEYKCKVSNKALPAPIEKTISKAKGQPREPQVYTLPPSRDELTKNQVSLTCLVKGFYPSDIAVEWESNGQPENNYKTTPPVLDSDGSFFLYSKLTVDKSRWQQGNVFSCSVMHEALHNHYTQKSLSLSPGK

SEQ ID NO: 1265 - protein, 253 aa, synthetic construct
  REGION 1..253: note = LAG3 136-156-Fc
LRPARRADAGEYRAAVHLRDREPKSCDKTHTCPPCPAPELLGGPSVFLFPPKPKDTLMISRTPEVTCVVVDVSHEDPEVKFNWYVDGVEVHNAKTKPREEQYNSTYRVVSVLTVLHQDWLNGKEYKCKVSNKALPAPIEKTISKAKGQPREPQVYTLPPSRDELTKNQVSLTCLVKGFYPSDIAVEWESNGQPENNYKTTPPVLDSDGSFFLYSKLTVDKSRWQQGNVFSCSVMHEALHNHYTQKSLSLSPGK

SEQ ID NO: 1266 - protein, 244 aa, synthetic construct
  REGION 1..244: note = LAG3 141-152-Fc
RADAGEYRAAVHEPKSCDKTHTCPPCPAPELLGGPSVFLFPPKPKDTLMISRTPEVTCVVVDVSHEDPEVKFNWYVDGVEVHNAKTKPREEQYNSTYRVVSVLTVLHQDWLNGKEYKCKVSNKALPAPIEKTISKAKGQPREPQVYTLPPSRDELTKNQVSLTCLVKGFYPSDIAVEWESNGQPENNYKTTPPVLDSDGSFFLYSKLTVDKSRWQQGNVFSCSVMHEALHNHYTQKSLSLSPGK

SEQ ID NO: 1267 - protein, 248 aa, synthetic construct
  REGION 1..248: note = LAG3 137-152-Fc
RPARRADAGEYRAAVHEPKSCDKTHTCPPCPAPELLGGPSVFLFPPKPKDTLMISRTPEVTCVVVDVSHEDPEVKFNWYVDGVEVHNAKTKPREEQYNSTYRVVSVLTVLHQDWLNGKEYKCKVSNKALPAPIEKTISKAKGQPREPQVYTLPPSRDELTKNQVSLTCLVKGFYPSDIAVEWESNGQPENNYKTTPPVLDSDGSFFLYSKLTVDKSRWQQGNVFSCSVMHEALHNHYTQKSLSLSPGK

SEQ ID NO: 1268 - protein, 257 aa, synthetic construct
  REGION 1..257: note = LAG3 97-121-Fc
RRYTVLSVGPGGLRSGRLPLQPRVQEPKSCDKTHTCPPCPAPELLGGPSVFLFPPKPKDTLMISRTPEVTCVVVDVSHEDPEVKFNWYVDGVEVHNAKTKPREEQYNSTYRVVSVLTVLHQDWLNGKEYKCKVSNKALPAPIEKTISKAKGQPREPQVYTLPPSRDELTKNQVSLTCLVKGFYPSDIAVEWESNGQPENNYKTTPPVLDSDGSFFLYSKLTVDKSRWQQGNVFSCSVMHEALHNHYTQKSLSLSPGK

SEQ ID NO: 1269 - protein, 249 aa, synthetic construct
  REGION 1..249: note = LAG3 130-146-Fc
GDFSLWLRPARRADAGEEPKSCDKTHTCPPCPAPELLGGPSVFLFPPKPKDTLMISRTPEVTCVVVDVSHEDPEVKFNWYVDGVEVHNAKTKPREEQYNSTYRVVSVLTVLHQDWLNGKEYKCKVSNKALPAPIEKTISKAKGQPREPQVYTLPPSRDELTKNQVSLTCLVKGFYPSDIAVEWESNGQPENNYKTTPPVLDSDGSFFLYSKLTVDKSRWQQGNVFSCSVMHEALHNHYTQKSLSLSPGK

SEQ ID NO: 1270 - DNA, 789 bp, synthetic construct
  misc_feature 1..789: note = LAG3 121-152-Fc polynucleotide
  source 1..789: mol_type = other DNA
cttgatgaacgcggccgccaaagaggagatttcagtctgtggctgagacctgcccgcagggctgacgccggggagtatagagcggccgtacatgaacccaagagttgtgacaaaacccacacttgccctccctgtccagcaccagagttgctgggtggtccttcagtgtttctgtttccccctaagccaaaggacaccttgatgatttctcgcacacccgaagttacgtgtgtcgtagtggatgtgtcccatgaggacccagaagtaaagttcaactggtacgttgatggcgtcgaagttcacaacgctaaaaccaaaccgcgggaggagcaatacaatagcacctaccgcgtcgtgtctgtacttaccgttctccatcaggactggcttaatggcaaggagtataaatgtaaagtttccaacaaggccctcccggcacccatcgagaaaaccatttcaaaggccaaggggcaaccaagagagccacaggtttacaccctgccaccgagtagggatgagctcactaagaatcaggtgagtttgacctgtctggtcaagggcttttatccaagcgatatcgcagtggagtgggagtctaacggccagcctgagaacaactataagacaacaccacctgtcctggattccgatggcagctttttcctgtacagcaagctgacagtcgataagagccggtggcagcagggcaacgtcttctcctgcagtgtgatgcacgaagctctgcacaaccactacactcagaaatcactgtccctgtcaccaggcaag

SEQ ID NO: 1271 - DNA, 777 bp, synthetic construct
  misc_feature 1..777: note = LAG3 130-156-Fc polynucleotide
  source 1..777: mol_type = other DNA
ggagatttcagcctctggcttagaccagctcgacgagcagatgccggcgagtacagagcagcagtgcatctcagagatcgggagccaaagagctgcgacaagacacatacctgtccaccctgtccggctcctgaactgctggggggacctagtgtttttctgttcccgccaaagcctaaagacaccttgatgatttccagaacccctgaggtaacatgtgtggtagtcgacgttagccacgaggaccccgaggtgaaattcaattggtatgtagacggcgtggaagttcataatgccaagacgaagcccagggaggagcagtacaacagtacttatagagtcgtgtcagtgctgacggtgctgcatcaagattggttgaacggcaaggagtacaagtgtaaggtgagcaacaaagctctgccagccccaatcgaaaagacaatcagcaaggctaagggccagcctagagagccacaggtgtatactttgccaccatccagggatgagctgacaaagaatcaggttagcttgacctgtctggtgaaaggcttctacccctcagatattgcagtggaatgggagtctaacggacagcctgagaacaattacaagactacaccccctgtgctggactcagacggcagcttcttcctgtacagtaagctgactgtcgacaagtctaggtggcagcagggcaacgtgttttcctgtagtgtaatgcacgaagcactgcacaatcactacacgcagaaaagcctttccctgtcccccggtaag

SEQ ID NO: 1272 - DNA, 864 bp, synthetic construct
  misc_feature 1..864: note = LAG3 97-152-Fc polynucleotide
  source 1..864: mol_type = other DNA
agaaggtacactgttctctcagtcgggcctggaggactccgctccggaaggctccccctccagccaagggtgcaacttgatgagaggggaagacagagaggggacttctctctttggctgaggcctgcaagacgggctgatgcgggagaatacagagccgcagtccatgagccgaaatcttgcgacaaaacccatacatgtcctccctgcccagccccagaattgctcggagggccaagtgtgtttcttttccccccgaagcctaaggatactcttatgatttctaggacacccgaggtgacatgcgtggtcgttgacgtgagtcatgaggaccccgaggtcaagtttaactggtatgttgacggggtggaagtgcataacgctaagacaaaaccccgggaagagcaatacaactcaacgtatagagtcgtgtcagtgctgaccgtgcttcatcaggattggctcaacggcaaagaatataagtgtaaggttagtaataaggctctgcctgcacctatcgagaagactatcagcaaggcaaagggtcagccacgcgagcctcaggtgtatactctcccaccgagcagagacgagctgacgaaaaaccaagtaagcctcacttgtctggtaaaggggttttaccccagtgacatcgctgttgagtgggagagtaatggtcagccggaaaataactataaaaccacaccacctgtgctggacagcgacggatcttttttcttgtatagtaagctgactgtggataagtctcgatggcaacagggcaacgtcttctcttgctctgtcatgcatgaggccctccataaccattatacacaaaaaagcctgtctctcagccccggaaag

SEQ ID NO: 1273 - DNA, 858 bp, synthetic construct
  misc_feature 1..858: note = LAG3 97-150-Fc polynucleotide
  source 1..858: mol_type = other DNA
cgcaggtatacagttctctcagttgggcctggggggctcagaagcggacggctccctctgcagcctcgggtgcagctggatgaaaggggtaggcaacgcggagacttctcattgtggctcaggccagctagacgggcagatgcaggtgagtaccgagccgccgagccgaagtcctgcgataagacacatacttgccccccctgtcccgccccagagcttctgggaggccccagcgtatttctgtttcctcctaagcccaaagatacattgatgatttctcggaccccggaagttacttgcgttgtggtcgatgtcagccacgaagatcctgaggtaaaattcaactggtacgtcgacggggtcgaagtacataacgccaagaccaagccacgggaggaacagtataattccacctacagggtggtttcagtgcttactgtcctgcaccaggactggctgaacgggaaggaatataagtgcaaggtatccaataaggccctgccagctcctattgaaaagaccatcagcaaagccaaggggcaacctagggaaccccaggtttatacacttccaccgtcccgggatgaactgactaagaaccaggtttccctgacatgtctggtgaagggattctacccaagcgatatcgcagtcgaatgggaaagtaacgggcagccagagaataactacaaaaccacaccgcccgtgctggactctgatggatcttttttcctgtacagcaagctcaccgtggataagtcccgctggcaacagggaaacgtgttctcttgctccgttatgcatgaggctctgcacaatcactatacccagaaatccctgtctctgtccccgggcaag

SEQ ID NO: 1274 - DNA, 846 bp, synthetic construct
  misc_feature 1..846: note = LAG3 97-146-Fc polynucleotide
  source 1..846: mol_type = other DNA
cgccggtataccgttcttagcgtaggccctggcggactcagaagcggcagactgcccttgcagccaagggttcagcttgatgaacgcggcagacagaggggtgacttcagcctttggctgagaccagccagaagagcagacgccggtgaagagcccaaaagctgtgacaaaacccacacgtgtcctccttgtcctgccccagaactcctgggtgggccttctgtctttttgtttccccccaagcccaaagacactctgatgataagccgcacgcctgaagtcacatgtgtggtggtagatgttagccatgaagatccagaggtgaaatttaattggtatgttgatggcgttgaggtgcataacgccaaaaccaagccacgcgaggaacagtacaatagcacatacagggtggtgtcagtgctgaccgtgctgcatcaagactggctgaatggtaaagagtacaagtgcaaggtctccaacaaggcactgccagctccgattgagaaaaccatcagcaaggctaaggggcaaccacgggaaccacaggtgtacaccctgcccccatccagagatgagcttaccaagaatcaggtgtcactgacctgtctggtgaaggggttttacccgtcagatatcgcggtagaatgggagagcaacggccagccagaaaacaactacaagactaccccccccgtgctcgatagcgacggcagctttttcctgtattccaagctgacagtcgataaatccaggtggcaacagggcaatgtgtttagctgttctgtgatgcatgaggccctgcataaccattacacccaaaaaagcttgtcactgtcccctgggaag

SEQ ID NO: 1275 - DNA, 726 bp, synthetic construct
  misc_feature 1..726: note = LAG3 147-156-Fc polynucleotide
  source 1..726: mol_type = other DNA
taccgagctgccgtccacctgagagacagagaaccgaagagttgtgataaaactcatacatgtcctccctgtcccgcacctgagcttctcggcggtccatccgtgtttctgtttccacccaagcccaaggacaccctgatgattagcaggacacccgaagtgacgtgtgtagttgtggacgtgtcacacgaggacccagaggtgaagtttaattggtacgttgacggcgtggaggttcataatgccaaaactaagcccagggaggagcagtacaatagcacctacagggtggtttcagtcctgaccgtattgcatcaggattggctcaatgggaaggagtataagtgcaaggtctccaacaaagcacttcctgcccctatcgagaagaccatttctaaggccaaaggacagcccagagagccacaggtgtataccctcccaccgagtagagacgagctgacgaaaaaccaggtgagtttgacatgcctggtcaaaggcttctatccttccgatatcgccgttgaatgggaaagcaatggtcagcccgagaacaactacaagaccaccccccctgtcctggactccgatggctctttctttctctattccaagttgaccgtggacaaatccaggtggcagcagggtaatgtcttttcctgttccgtaatgcacgaggccttgcataatcactatacccaaaaatccctttccttgtcccccggcaaa

SEQ ID NO: 1276 - DNA, 783 bp, synthetic construct
  misc_feature 1..783: note = LAG3 121-150-Fc polynucleotide
  source 1..783: mol_type = other DNA
cttgacgaaagaggcagacaacggggtgattttagcttgtggctgcgaccggctcgacgggccgacgctggtgagtatagggcagctgagcccaaatcctgtgataagacacacacttgcccaccatgtcccgcacctgaactcctgggcggccctagcgtgttccttttcccacctaaaccgaaggataccttgatgatatcccggacccccgaagtcacctgcgtggtcgtggatgtgtcccatgaggatcccgaggtcaaattcaattggtacgttgacggtgtggaggtgcacaacgccaaaaccaagccacgcgaggagcagtataatagtacctaccgcgtggtctccgttctgactgtgctgcaccaggactggttgaatgggaaggaatataaatgcaaagtctcaaacaaggcactgccagccccgattgagaagacgattagcaaagccaagggacagccacgagagccacaagtgtacacactgccaccatcacgggatgaactcaccaaaaaccaggtctcactgacttgtctcgtcaaaggattctaccccagcgatatcgctgtggagtgggaaagcaatgggcaacccgagaacaactacaagactacccctccagtactggacagcgatggcagtttcttcctgtactctaagttgaccgtagacaagtccagatggcagcaaggcaatgtgttctcttgttccgtcatgcacgaggccctgcataaccattatacgcagaaatccctcagcctgagcccgggtaaa

SEQ ID NO: 1277 - DNA, 771 bp, synthetic construct
  misc_feature 1..771: note = LAG3 122-146-Fc polynucleotide
  source 1..771: mol_type = other DNA
ctcgacgagcggggaaggcaaagaggagatttctcattgtggctcagacccgctaggagagcagatgctggagaagagcccaaaagctgtgacaagacccacacttgcccaccatgcccagctcccgagttgcttgggggcccttccgtttttctgtttccaccgaagcccaaggataccctcatgatctctcggacccccgaggtaacctgtgttgtcgtcgatgtgtcccacgaggatcccgaggtgaagttcaactggtacgtggacggggtcgaagtgcataatgccaagacaaagcccagagaggaacagtataacagtacctatcgcgtggtgagcgtcctgactgtgctccatcaggactggttgaatgggaaggagtacaagtgtaaagtgtcaaacaaggcgctgcctgctccaatcgaaaaaaccatcagcaaggccaagggtcagccacgcgagccacaagtttatactctgcctccaagcagggatgagctgaccaaaaaccaggtgagcctcacatgccttgtgaagggattctatccttccgatatagcggttgaatgggaaagcaatggccagcccgagaataattataagacgacccctccagtcctggattctgatggtagcttcttcctgtattctaaattgacagtagacaagagccgctggcagcaaggtaatgtcttttcatgctccgtgatgcacgaggcccttcacaatcattatacgcagaagtcacttagcctctcccccggtaag

SEQ ID NO: 1278 - DNA, 744 bp, synthetic construct
  misc_feature 1..744: note = LAG3 141-156-Fc polynucleotide
  source 1..744: mol_type = other DNA
cgcgctgatgctggggaatatagagctgcagtccatcttagagacagagagccgaagtcctgtgataagactcacacttgtccaccttgtcctgcacccgagctgcttggaggaccaagcgtgtttttgttccccccaaagcccaaagacaccctcatgatttcaagaacacccgaggtcacttgcgtggttgtcgatgtctcacacgaagatccggaggtaaagttcaattggtacgtggatggggttgaggtccacaacgccaagactaagcctcgagaagagcagtataactccacctatcgggtcgtgtccgtgctgaccgtgctccaccaggattggctgaacggcaaagagtacaagtgtaaagtgagcaacaaggcacttcctgctcccattgagaagaccatcagcaaagcgaagggtcagcctagggaaccccaggtttataccttgcctcccagcagagacgagcttacaaagaaccaggtctctctgacttgcctggttaagggattttacccttccgacatagcggtggaatgggagagcaacgggcagcctgaaaataactacaagaccacaccacccgtcctcgactcagatggaagctttttcctgtactccaagcttactgtggataagtcccggtggcagcagggcaacgtctttagctgttctgtaatgcatgaagctctgcataatcactacacccagaagagcctgtctctctcccccggaaaa

SEQ ID NO: 1279 - DNA, 759 bp, synthetic construct
  misc_feature 1..759: note = LAG3 136-156-Fc polynucleotide
  source 1..759: mol_type = other DNA
ctgagacccgctagaagagcagatgcaggtgaatacagagccgccgtgcatctccgagatagggagccaaagagttgcgacaagacccacacatgtccaccctgtccagctcctgagttgctgggaggaccctccgtgttcctgtttcctcccaagccaaaggatacactcatgataagccgcacccctgaagttacttgtgttgttgttgatgtctcccatgaggatccggaagtgaagttcaactggtatgtcgatggcgtggaggtccacaacgctaaaacaaagccccgagaggagcaatacaatagcacatacagagtggtgagcgtcctgacagtcctgcaccaagattggttgaacggcaaggaatacaagtgcaaggtctctaacaaggctctgccagcacccattgagaaaaccatatcaaaggccaaaggtcagccaagggaaccacaggtctacaccctgcctccttcccgggacgagctgacaaaaaaccaggtgagcctgacttgtctggtcaagggattttacccgagtgacatcgcggtggagtgggagagtaatggacagcccgaaaataactataaaacgacgcccccagtcctcgattccgatggcagcttcttcctgtatagcaaactgacagtggacaaaagtcggtggcagcagggcaatgttttttcctgttctgttatgcacgaggcgctccataaccactacacccagaagtctctgagcctgtcccccgggaag

SEQ ID NO: 1280 - DNA, 732 bp, synthetic construct
  misc_feature 1..732: note = LAG3 141-152-Fc polynucleotide
  source 1..732: mol_type = other DNA
agagctgacgctggagaatatagagcagcagtccatgagcctaaatcatgcgacaagacgcatacctgtcctccctgcccagcaccagagcttctgggtggaccttcagtgtttctgttcccaccaaaaccaaaggacaccctgatgatcagtaggacgcctgaggtgacttgcgttgttgtggacgtgagccatgaggaccccgaggtaaagtttaactggtacgttgacggggtggaggtccataacgcaaagacgaaaccacgcgaggagcaatacaacagcacctatagggtcgtctctgtgctgacagtgctgcatcaagattggctgaatggaaaagagtataagtgcaaggtttcaaacaaggcccttcccgcccccattgagaagactatctccaaagcgaaaggccaacccagagagcctcaggtttataccctcccaccttcccgcgatgagctgacaaaaaatcaggtgagcctgacctgtctggtcaaggggttctatcccagcgacatcgcagttgagtgggagagcaacggccaacccgagaataattataagaccacgcctccggtcctcgatagcgacggttccttcttcctgtatagcaagctcaccgtggacaaaagccgctggcagcaggggaacgtgttctcttgttccgtcatgcatgaagcgttgcacaaccactacacacagaagtctctttcactgagcccggggaaa

SEQ ID NO: 1281 - DNA, 744 bp, synthetic construct
  misc_feature 1..744: note = LAG3 137-152-Fc polynucleotide
  source 1..744: mol_type = other DNA
aggcccgcaagacgagctgacgcaggagaatacagagccgccgtgcatgagcccaaatcctgcgataaaacccatacttgccccccttgcccagctccggaattgttgggcggtccttccgtctttctgttccccccaaagcctaaggacaccctcatgataagccgaacacccgaggtgacttgtgtcgtggtggatgttagtcacgaggaccccgaagttaaattcaactggtacgttgatggcgtagaagtgcacaatgccaagaccaaacctcgcgaagaacagtataacagtacgtatcgggttgttagcgtccttacggttctgcatcaagattggttgaatgggaaggagtacaagtgcaaggtttcaaacaaggcactgccagcgcctatcgagaagacgatctctaaggcgaaggggcagcccagggagcctcaagtgtatacacttcctcctagcagggatgagctgactaaaaatcaagtcagcctgacctgcctggtgaaaggcttctatccttctgatattgcagtcgaatgggaaagcaacggccagcccgagaacaactataagactaccccacccgtattggactccgacggctcctttttcctgtatagcaagttgaccgtggacaaaagtagatggcaacagggcaacgtgttcagttgttcagtcatgcacgaggctcttcataatcactacactcagaagtctctcagtctgtcccccggaaaa

SEQ ID NO: 1282 - DNA, 771 bp, synthetic construct
  misc_feature 1..771: note = LAG3 97-121-Fc polynucleotide
  source 1..771: mol_type = other DNA
cgcagatatacagtactctcagttggcccaggcggcttgcgaagtggaaggctgcctctgcaaccccgggttcaagagcccaaaagctgcgacaagacccatacgtgccctccatgtccagcacctgaactgctgggaggacccagtgtatttctgttccccccgaaacctaaggacacccttatgatctcacgcactccagaagtcacatgtgtggtagtggacgtatcacatgaggaccccgaggtgaagtttaattggtacgttgacggcgtcgaagtgcataacgccaaaactaagccaagggaggagcagtacaatagcacatatcgggtcgtctctgtgctgacagtgttgcatcaggactggctgaatggcaaagagtacaaatgcaaagttagcaacaaggcactgcctgcgccgatcgagaagactattagtaaggccaaggggcagcctagggaaccccaggtttatacactgcccccctcaagggacgagcttaccaaaaatcaggtgagcctcacctgccttgtcaagggattttacccgagtgacatcgctgtagagtgggagtccaacggtcagccagagaacaactataagaccactccccccgttctggattctgatggcagtttcttcctgtatagcaagttgacagtagataaatcaaggtggcaacagggcaatgtatttagctgcagcgtcatgcatgaagctttgcataaccactatactcagaagagcctgtccctgagcccggggaaa

SEQ ID NO: 1283 - DNA, 795 bp, synthetic construct
  misc_feature 1..795: note = LAG3 97-129-Fc polynucleotide
  source 1..795: mol_type = other DNA
cgaagatacacagtgctttcagtgggaccaggaggcctcagaagcggtcgacttcctctccaacccagagtgcaactggatgagagagggagacagcgggagccaaagtcttgcgacaagacacacacttgcccaccctgtcctgctcccgaacttctgggcggcccttcagtttttctcttccccccgaagccgaaggatacccttatgataagccggacaccggaggtgacctgcgtggtcgtggacgttagccacgaggaccctgaagtgaaattcaattggtatgtcgatggagtcgaggtgcacaacgctaagacaaagccccgcgaggagcagtataacagtacgtatcgggtggtttccgtcctgactgtgcttcatcaggattggttgaatggcaaagagtacaagtgtaaggtctcaaacaaagccctgcccgctcccattgagaagactatctccaaagcaaaagggcagcccagagagccccaggtctatactctgcctccatcccgcgacgaactgactaaaaaccaagtgtctctgacctgcctggtaaagggcttttatcccagcgacattgccgtcgagtgggaaagcaacgggcagccggagaataattataagactactccgccagtccttgactctgacggcagtttcttcctttactccaaactgactgtggacaaatcacggtggcaacaggggaatgttttctcctgttccgtcatgcatgaggcattgcacaatcactacactcagaagtccctctctttgagcccagggaaa

SEQ ID NO: 1284 - DNA, 747 bp, synthetic construct
  misc_feature 1..747: note = LAG3 130-146-Fc polynucleotide
  source 1..747: mol_type = other DNA
ggagatttttcactctggctgagacccgcaagaagagcagacgccggcgaagaacccaagtcatgcgataaaacccatacctgtcccccctgcccagctccagaactcttgggcggtccgtccgtatttctctttccacccaaacctaaagatactctcatgatcagccgcacaccagaagtcacttgcgtggtcgtggatgtctcccatgaggacccagaggtgaagttcaattggtacgtcgatggggtggaagtgcataacgcgaagacaaagcccagggaagagcaatacaacagtacctacagggttgttagtgtgctgactgtacttcatcaggactggctcaacggtaaggagtacaagtgcaaagtttccaacaaggccctgcccgcaccaatagagaagactataagcaaggccaagggccaaccgagagagccacaggtgtacacgcttcctccatcaagagatgagctcactaaaaatcaggtgtctctcacctgccttgtgaagggtttctacccctccgatatcgctgtggaatgggagagtaacggccagcccgagaacaactataaaaccaccccaccagttctggacagcgatggctccttcttcctctattctaaactgacggtggacaagtccagatggcagcagggaaacgtgttctcatgttctgttatgcatgaagctctccataaccactatacccagaagtcactgtccctgtcacccgggaaa

SEQ ID NO: 1285 - protein, 18 aa, synthetic construct
  REGION 1..18: note = LAG3 104-121 R110K
VGPGGLKSGRLPLQPRVQ

SEQ ID NO: 1286 - protein, 18 aa, synthetic construct
  REGION 1..18: note = LAG3 104-121 R113K
VGPGGLRSGKLPLQPRVQ

SEQ ID NO: 1287 - protein, 18 aa, synthetic construct
  REGION 1..18: note = LAG3 104-121 R110K/R113K
VGPGGLKSGKLPLQPRVQ

SEQ ID NO: 1288 - protein, 18 aa, synthetic construct
  REGION 1..18: note = LAG3 104-121 R119K
VGPGGLRSGRLPLQPKVQ

SEQ ID NO: 1289 - protein, 18 aa, synthetic construct
  REGION 1..18: note = LAG3 104-121 R110K/R119K
VGPGGLKSGRLPLQPKVQ

SEQ ID NO: 1290 - protein, 18 aa, synthetic construct
  REGION 1..18: note = LAG3 104-121 R113K/R119K
VGPGGLRSGKLPLQPKVQ

SEQ ID NO: 1291 - protein, 18 aa, synthetic construct
  REGION 1..18: note = LAG3 104-121 R110K/R113K/R119K
VGPGGLKSGKLPLQPKVQ

SEQ ID NO: 1292 - protein, 25 aa, synthetic construct
  REGION 1..25: note = LAG3 122-146 R129K
LDERGRQKGDFSLWLRPARRADAGE

SEQ ID NO: 1293 - protein, 25 aa, synthetic construct
  REGION 1..25: note = LAG3 122-146 G130P
LDERGRQRPDFSLWLRPARRADAGE

SEQ ID NO: 1294 - protein, 25 aa, synthetic construct
  REGION 1..25: note = LAG3 122-146 G130A
LDERGRQRADFSLWLRPARRADAGE

SEQ ID NO: 1295 - protein, 25 aa, synthetic construct
  REGION 1..25: note = LAG3 122-146 G130T
LDERGRQRTDFSLWLRPARRADAGE

SEQ ID NO: 1296 - protein, 25 aa, synthetic construct
  REGION 1..25: note = LAG3 122-146 G130Y
LDERGRQRYDFSLWLRPARRADAGE

SEQ ID NO: 1297 - protein, 25 aa, synthetic construct
  REGION 1..25: note = LAG3 122-146 G130S
LDERGRQRSDFSLWLRPARRADAGE

SEQ ID NO: 1298 - protein, 25 aa, synthetic construct
  REGION 1..25: note = LAG3 122-146 R141K
LDERGRQRGDFSLWLRPARKADAGE

SEQ ID NO: 1299 - protein, 25 aa, synthetic construct
  REGION 1..25: note = LAG3 122-146 R129K/G130P
LDERGRQKPDFSLWLRPARRADAGE

SEQ ID NO: 1300 - protein, 25 aa, synthetic construct
  REGION 1..25: note = LAG3 122-146 R129K/R141K
LDERGRQKGDFSLWLRPARKADAGE

SEQ ID NO: 1301 - protein, 25 aa, synthetic construct
  REGION 1..25: note = LAG3 122-146 G130P/R141K
LDERGRQRPDFSLWLRPARKADAGE

SEQ ID NO: 1302 - protein, 25 aa, synthetic construct
  REGION 1..25: note = LAG3 122-146 G130A/R141K
LDERGRQRADFSLWLRPARKADAGE

SEQ ID NO: 1303 - protein, 25 aa, synthetic construct
  REGION 1..25: note = LAG3 122-146 G130T/R141K
LDERGRQRTDFSLWLRPARKADAGE

SEQ ID NO: 1304 - protein, 25 aa, synthetic construct
  REGION 1..25: note = LAG3 122-146 G130Y/R141K
LDERGRQRYDFSLWLRPARKADAGE

SEQ ID NO: 1305 - protein, 25 aa, synthetic construct
  REGION 1..25: note = LAG3 122-146 G130S/R141K
LDERGRQRSDFSLWLRPARKADAGE

SEQ ID NO: 1306 - protein, 43 aa, synthetic construct
  REGION 1..43: note = LAG3 104-146 R110K
VGPGGLKSGRLPLQPRVQLDERGRQRGDFSLWLRPARRADAGE

SEQ ID NO: 1307 - protein, 43 aa, synthetic construct
  REGION 1..43: note = LAG3 104-146 R113K
VGPGGLRSGKLPLQPRVQLDERGRQRGDFSLWLRPARRADAGE

SEQ ID NO: 1308 - protein, 43 aa, synthetic construct
  REGION 1..43: note = LAG3 104-146 R129K
VGPGGLRSGRLPLQPRVQLDERGRQKGDFSLWLRPARRADAGE

SEQ ID NO: 1309 - protein, 43 aa, synthetic construct
  REGION 1..43: note = LAG3 104-146 G130P
VGPGGLRSGRLPLQPRVQLDERGRQRPDFSLWLRPARRADAGE

SEQ ID NO: 1310 - protein, 43 aa, synthetic construct
  REGION 1..43: note = LAG3 104-146 G130A
VGPGGLRSGRLPLQPRVQLDERGRQRADFSLWLRPARRADAGE

SEQ ID NO: 1311 - protein, 43 aa, synthetic construct
  REGION 1..43: note = LAG3 104-146 G130T
VGPGGLRSGRLPLQPRVQLDERGRQRTDFSLWLRPARRADAGE

SEQ ID NO: 1312 - protein, 43 aa, synthetic construct
  REGION 1..43: note = LAG3 104-146 G130Y
VGPGGLRSGRLPLQPRVQLDERGRQRYDFSLWLRPARRADAGE

SEQ ID NO: 1313 - protein, 43 aa, synthetic construct
  REGION 1..43: note = LAG3 104-146 G130S
VGPGGLRSGRLPLQPRVQLDERGRQRSDFSLWLRPARRADAGE

SEQ ID NO: 1314 - protein, 43 aa, synthetic construct
  REGION 1..43: note = LAG3 104-146 R141K
VGPGGLRSGRLPLQPRVQLDERGRQRGDFSLWLRPARKADAGE

SEQ ID NO: 1315 - protein, 43 aa, synthetic construct
  REGION 1..43: note = LAG3 104-146 R110K/G130P
VGPGGLKSGRLPLQPRVQLDERGRQRPDFSLWLRPARRADAGE

SEQ ID NO: 1316 - protein, 43 aa, synthetic construct
  REGION 1..43: note = LAG3 104-146 G130P/R141K
VGPGGLRSGRLPLQPRVQLDERGRQRPDFSLWLRPARKADAGE

SEQ ID NO: 1317 - protein, 43 aa, synthetic construct
  REGION 1..43: note = LAG3 104-146 R110K/R141K
VGPGGLKSGRLPLQPRVQLDERGRQRGDFSLWLRPARKADAGE

SEQ ID NO: 1318 - protein, 43 aa, synthetic construct
  REGION 1..43: note = LAG3 104-146 R110K/G130P/R141K
VGPGGLKSGRLPLQPRVQLDERGRQRPDFSLWLRPARKADAGE

SEQ ID NO: 1319 - protein, 250 aa, synthetic construct
  REGION 1..250: note = LAG3 104-121 R110K-Fc
VGPGGLKSGRLPLQPRVQEPKSCDKTHTCPPCPAPELLGGPSVFLFPPKPKDTLMISRTPEVTCVVVDVSHEDPEVKFNWYVDGVEVHNAKTKPREEQYNSTYRVVSVLTVLHQDWLNGKEYKCKVSNKALPAPIEKTISKAKGQPREPQVYTLPPSRDELTKNQVSLTCLVKGFYPSDIAVEWESNGQPENNYKTTPPVLDSDGSFFLYSKLTVDKSRWQQGNVFSCSVMHEALHNHYTQKSLSLSPGK

SEQ ID NO: 1320 - protein, 250 aa, synthetic construct
  REGION 1..250: note = LAG3 104-121 R113K-Fc
VGPGGLRSGKLPLQPRVQEPKSCDKTHTCPPCPAPELLGGPSVFLFPPKPKDTLMISRTPEVTCVVVDVSHEDPEVKFNWYVDGVEVHNAKTKPREEQYNSTYRVVSVLTVLHQDWLNGKEYKCKVSNKALPAPIEKTISKAKGQPREPQVYTLPPSRDELTKNQVSLTCLVKGFYPSDIAVEWESNGQPENNYKTTPPVLDSDGSFFLYSKLTVDKSRWQQGNVFSCSVMHEALHNHYTQKSLSLSPGK

SEQ ID NO: 1321 - protein, 250 aa, synthetic construct
  REGION 1..250: note = LAG3 104-121 R110K/R113K-Fc
VGPGGLKSGKLPLQPRVQEPKSCDKTHTCPPCPAPELLGGPSVFLFPPKPKDTLMISRTPEVTCVVVDVSHEDPEVKFNWYVDGVEVHNAKTKPREEQYNSTYRVVSVLTVLHQDWLNGKEYKCKVSNKALPAPIEKTISKAKGQPREPQVYTLPPSRDELTKNQVSLTCLVKGFYPSDIAVEWESNGQPENNYKTTPPVLDSDGSFFLYSKLTVDKSRWQQGNVFSCSVMHEALHNHYTQKSLSLSPGK

SEQ ID NO: 1322 - protein, 250 aa, synthetic construct
  REGION 1..250: note = LAG3 104-121 R119K-Fc
VGPGGLRSGRLPLQPKVQEPKSCDKTHTCPPCPAPELLGGPSVFLFPPKPKDTLMISRTPEVTCVVVDVSHEDPEVKFNWYVDGVEVHNAKTKPREEQYNSTYRVVSVLTVLHQDWLNGKEYKCKVSNKALPAPIEKTISKAKGQPREPQVYTLPPSRDELTKNQVSLTCLVKGFYPSDIAVEWESNGQPENNYKTTPPVLDSDGSFFLYSKLTVDKSRWQQGNVFSCSVMHEALHNHYTQKSLSLSPGK

SEQ ID NO: 1323 - protein, 250 aa, synthetic construct
  REGION 1..250: note = LAG3 104-121 R110K/R119K-Fc
VGPGGLKSGRLPLQPKVQEPKSCDKTHTCPPCPAPELLGGPSVFLFPPKPKDTLMISRTPEVTCVVVDVSHEDPEVKFNWYVDGVEVHNAKTKPREEQYNSTYRVVSVLTVLHQDWLNGKEYKCKVSNKALPAPIEKTISKAKGQPREPQVYTLPPSRDELTKNQVSLTCLVKGFYPSDIAVEWESNGQPENNYKTTPPVLDSDGSFFLYSKLTVDKSRWQQGNVFSCSVMHEALHNHYTQKSLSLSPGK

SEQ ID NO: 1324 - protein, 250 aa, synthetic construct
  REGION 1..250: note = LAG3 104-121 R113K/R119K-Fc
VGPGGLRSGKLPLQPKVQEPKSCDKTHTCPPCPAPELLGGPSVFLFPPKPKDTLMISRTPEVTCVVVDVSHEDPEVKFNWYVDGVEVHNAKTKPREEQYNSTYRVVSVLTVLHQDWLNGKEYKCKVSNKALPAPIEKTISKAKGQPREPQVYTLPPSRDELTKNQVSLTCLVKGFYPSDIAVEWESNGQPENNYKTTPPVLDSDGSFFLYSKLTVDKSRWQQGNVFSCSVMHEALHNHYTQKSLSLSPGK

SEQ ID NO: 1325 - protein, 250 aa, synthetic construct
  REGION 1..250: note = LAG3 104-121 R110K/R113K/R119K-Fc
VGPGGLKSGKLPLQPKVQEPKSCDKTHTCPPCPAPELLGGPSVFLFPPKPKDTLMISRTPEVTCVVVDVSHEDPEVKFNWYVDGVEVHNAKTKPREEQYNSTYRVVSVLTVLHQDWLNGKEYKCKVSNKALPAPIEKTISKAKGQPREPQVYTLPPSRDELTKNQVSLTCLVKGFYPSDIAVEWESNGQPENNYKTTPPVLDSDGSFFLYSKLTVDKSRWQQGNVFSCSVMHEALHNHYTQKSLSLSPGK

SEQ ID NO: 1326 - protein, 257 aa, synthetic construct
  REGION 1..257: note = LAG3 122-146 R129K-Fc
LDERGRQKGDFSLWLRPARRADAGEEPKSCDKTHTCPPCPAPELLGGPSVFLFPPKPKDTLMISRTPEVTCVVVDVSHEDPEVKFNWYVDGVEVHNAKTKPREEQYNSTYRVVSVLTVLHQDWLNGKEYKCKVSNKALPAPIEKTISKAKGQPREPQVYTLPPSRDELTKNQVSLTCLVKGFYPSDIAVEWESNGQPENNYKTTPPVLDSDGSFFLYSKLTVDKSRWQQGNVFSCSVMHEALHNHYTQKSLSLSPGK

SEQ ID NO: 1327 - protein, 257 aa, synthetic construct
  REGION 1..257: note = LAG3 122-146 G130P-Fc
LDERGRQRPDFSLWLRPARRADAGEEPKSCDKTHTCPPCPAPELLGGPSVFLFPPKPKDTLMISRTPEVTCVVVDVSHEDPEVKFNWYVDGVEVHNAKTKPREEQYNSTYRVVSVLTVLHQDWLNGKEYKCKVSNKALPAPIEKTISKAKGQPREPQVYTLPPSRDELTKNQVSLTCLVKGFYPSDIAVEWESNGQPENNYKTTPPVLDSDGSFFLYSKLTVDKSRWQQGNVFSCSVMHEALHNHYTQKSLSLSPGK

SEQ ID NO: 1328 - protein, 257 aa, synthetic construct
  REGION 1..257: note = LAG3 122-146 G130A-Fc
LDERGRQRADFSLWLRPARRADAGEEPKSCDKTHTCPPCPAPELLGGPSVFLFPPKPKDTLMISRTPEVTCVVVDVSHEDPEVKFNWYVDGVEVHNAKTKPREEQYNSTYRVVSVLTVLHQDWLNGKEYKCKVSNKALPAPIEKTISKAKGQPREPQVYTLPPSRDELTKNQVSLTCLVKGFYPSDIAVEWESNGQPENNYKTTPPVLDSDGSFFLYSKLTVDKSRWQQGNVFSCSVMHEALHNHYTQKSLSLSPGK

SEQ ID NO: 1329 - protein, 257 aa, synthetic construct
  REGION 1..257: note = LAG3 122-146 G130T-Fc
LDERGRQRTDFSLWLRPARRADAGEEPKSCDKTHTCPPCPAPELLGGPSVFLFPPKPKDTLMISRTPEVTCVVVDVSHEDPEVKFNWYVDGVEVHNAKTKPREEQYNSTYRVVSVLTVLHQDWLNGKEYKCKVSNKALPAPIEKTISKAKGQPREPQVYTLPPSRDELTKNQVSLTCLVKGFYPSDIAVEWESNGQPENNYKTTPPVLDSDGSFFLYSKLTVDKSRWQQGNVFSCSVMHEALHNHYTQKSLSLSPGK

SEQ ID NO: 1330 - protein, 257 aa, synthetic construct
  REGION 1..257: note = LAG3 122-146 G130Y-Fc
LDERGRQRYDFSLWLRPARRADAGEEPKSCDKTHTCPPCPAPELLGGPSVFLFPPKPKDTLMISRTPEVTCVVVDVSHEDPEVKFNWYVDGVEVHNAKTKPREEQYNSTYRVVSVLTVLHQDWLNGKEYKCKVSNKALPAPIEKTISKAKGQPREPQVYTLPPSRDELTKNQVSLTCLVKGFYPSDIAVEWESNGQPENNYKTTPPVLDSDGSFFLYSKLTVDKSRWQQGNVFSCSVMHEALHNHYTQKSLSLSPGK

SEQ ID NO: 1331 - protein, 257 aa, synthetic construct
  REGION 1..257: note = LAG3 122-146 G130S-Fc
LDERGRQRSDFSLWLRPARRADAGEEPKSCDKTHTCPPCPAPELLGGPSVFLFPPKPKDTLMISRTPEVTCVVVDVSHEDPEVKFNWYVDGVEVHNAKTKPREEQYNSTYRVVSVLTVLHQDWLNGKEYKCKVSNKALPAPIEKTISKAKGQPREPQVYTLPPSRDELTKNQVSLTCLVKGFYPSDIAVEWESNGQPENNYKTTPPVLDSDGSFFLYSKLTVDKSRWQQGNVFSCSVMHEALHNHYTQKSLSLSPGK

SEQ ID NO: 1332 - protein, 257 aa, synthetic construct
  REGION 1..257: note = LAG3 122-146 R141K-Fc
LDERGRQRGDFSLWLRPARKADAGEEPKSCDKTHTCPPCPAPELLGGPSVFLFPPKPKDTLMISRTPEVTCVVVDVSHEDPEVKFNWYVDGVEVHNAKTKPREEQYNSTYRVVSVLTVLHQDWLNGKEYKCKVSNKALPAPIEKTISKAKGQPREPQVYTLPPSRDELTKNQVSLTCLVKGFYPSDIAVEWESNGQPENNYKTTPPVLDSDGSFFLYSKLTVDKSRWQQGNVFSCSVMHEALHNHYTQKSLSLSPGK

SEQ ID NO: 1333 - protein, 257 aa, synthetic construct
  REGION 1..257: note = LAG3 122-146 R129K/G130P-Fc
LDERGRQKPDFSLWLRPARRADAGEEPKSCDKTHTCPPCPAPELLGGPSVFLFPPKPKDTLMISRTPEVTCVVVDVSHEDPEVKFNWYVDGVEVHNAKTKPREEQYNSTYRVVSVLTVLHQDWLNGKEYKCKVSNKALPAPIEKTISKAKGQPREPQVYTLPPSRDELTKNQVSLTCLVKGFYPSDIAVEWESNGQPENNYKTTPPVLDSDGSFFLYSKLTVDKSRWQQGNVFSCSVMHEALHNHYTQKSLSLSPGK

SEQ ID NO: 1334 - protein, 257 aa, synthetic construct
  REGION 1..257: note = LAG3 122-146 R129K/R141K-Fc
LDERGRQKGDFSLWLRPARKADAGEEPKSCDKTHTCPPCPAPELLGGPSVFLFPPKPKDTLMISRTPEVTCVVVDVSHEDPEVKFNWYVDGVEVHNAKTKPREEQYNSTYRVVSVLTVLHQDWLNGKEYKCKVSNKALPAPIEKTISKAKGQPREPQVYTLPPSRDELTKNQVSLTCLVKGFYPSDIAVEWESNGQPENNYKTTPPVLDSDGSFFLYSKLTVDKSRWQQGNVFSCSVMHEALHNHYTQKSLSLSPGK

SEQ ID NO: 1335 - protein, 257 aa, synthetic construct
  REGION 1..257: note = LAG3 122-146 G130P/R141K-Fc
LDERGRQRPDFSLWLRPARKADAGEEPKSCDKTHTCPPCPAPELLGGPSVFLFPPKPKDTLMISRTPEVTCVVVDVSHEDPEVKFNWYVDGVEVHNAKTKPREEQYNSTYRVVSVLTVLHQDWLNGKEYKCKVSNKALPAPIEKTISKAKGQPREPQVYTLPPSRDELTKNQVSLTCLVKGFYPSDIAVEWESNGQPENNYKTTPPVLDSDGSFFLYSKLTVDKSRWQQGNVFSCSVMHEALHNHYTQKSLSLSPGK

SEQ ID NO: 1336 - protein, 257 aa, synthetic construct
  REGION 1..257: note = LAG3 122-146 G130A/R141K-Fc
LDERGRQRADFSLWLRPARKADAGEEPKSCDKTHTCPPCPAPELLGGPSVFLFPPKPKDTLMISRTPEVTCVVVDVSHEDPEVKFNWYVDGVEVHNAKTKPREEQYNSTYRVVSVLTVLHQDWLNGKEYKCKVSNKALPAPIEKTISKAKGQPREPQVYTLPPSRDELTKNQVSLTCLVKGFYPSDIAVEWESNGQPENNYKTTPPVLDSDGSFFLYSKLTVDKSRWQQGNVFSCSVMHEALHNHYTQKSLSLSPGK

SEQ ID NO: 1337 - protein, 257 aa, synthetic construct
  REGION 1..257: note = LAG3 122-146 G130T/R141K-Fc
LDERGRQRTDFSLWLRPARKADAGEEPKSCDKTHTCPPCPAPELLGGPSVFLFPPKPKDTLMISRTPEVTCVVVDVSHEDPEVKFNWYVDGVEVHNAKTKPREEQYNSTYRVVSVLTVLHQDWLNGKEYKCKVSNKALPAPIEKTISKAKGQPREPQVYTLPPSRDELTKNQVSLTCLVKGFYPSDIAVEWESNGQPENNYKTTPPVLDSDGSFFLYSKLTVDKSRWQQGNVFSCSVMHEALHNHYTQKSLSLSPGK

SEQ ID NO: 1338 - protein, 257 aa, synthetic construct
  REGION 1..257: note = LAG3 122-146 G130Y/R141K-Fc
LDERGRQRYDFSLWLRPARKADAGEEPKSCDKTHTCPPCPAPELLGGPSVFLFPPKPKDTLMISRTPEVTCVVVDVSHEDPEVKFNWYVDGVEVHNAKTKPREEQYNSTYRVVSVLTVLHQDWLNGKEYKCKVSNKALPAPIEKTISKAKGQPREPQVYTLPPSRDELTKNQVSLTCLVKGFYPSDIAVEWESNGQPENNYKTTPPVLDSDGSFFLYSKLTVDKSRWQQGNVFSCSVMHEALHNHYTQKSLSLSPGK

SEQ ID NO: 1339 - protein, 257 aa, synthetic construct
  REGION 1..257: note = LAG3 122-146 G130S/R141K-Fc
LDERGRQRSDFSLWLRPARKADAGEEPKSCDKTHTCPPCPAPELLGGPSVFLFPPKPKDTLMISRTPEVTCVVVDVSHEDPEVKFNWYVDGVEVHNAKTKPREEQYNSTYRVVSVLTVLHQDWLNGKEYKCKVSNKALPAPIEKTISKAKGQPREPQVYTLPPSRDELTKNQVSLTCLVKGFYPSDIAVEWESNGQPENNYKTTPPVLDSDGSFFLYSKLTVDKSRWQQGNVFSCSVMHEALHNHYTQKSLSLSPGK

SEQ ID NO: 1340 - protein, 275 aa, synthetic construct
  REGION 1..275: note = LAG3 104-146 R110K-Fc
VGPGGLKSGRLPLQPRVQLDERGRQRGDFSLWLRPARRADAGEEPKSCDKTHTCPPCPAPELLGGPSVFLFPPKPKDTLMISRTPEVTCVVVDVSHEDPEVKFNWYVDGVEVHNAKTKPREEQYNSTYRVVSVLTVLHQDWLNGKEYKCKVSNKALPAPIEKTISKAKGQPREPQVYTLPPSRDELTKNQVSLTCLVKGFYPSDIAVEWESNGQPENNYKTTPPVLDSDGSFFLYSKLTVDKSRWQQGNVFSCSVMHEALHNHYTQKSLSLSPGK

SEQ ID NO: 1341 - protein, 275 aa, synthetic construct
  REGION 1..275: note = LAG3 104-146 R113K-Fc
VGPGGLRSGKLPLQPRVQLDERGRQRGDFSLWLRPARRADAGEEPKSCDKTHTCPPCPAPELLGGPSVFLFPPKPKDTLMISRTPEVTCVVVDVSHEDPEVKFNWYVDGVEVHNAKTKPREEQYNSTYRVVSVLTVLHQDWLNGKEYKCKVSNKALPAPIEKTISKAKGQPREPQVYTLPPSRDELTKNQVSLTCLVKGFYPSDIAVEWESNGQPENNYKTTPPVLDSDGSFFLYSKLTVDKSRWQQGNVFSCSVMHEALHNHYTQKSLSLSPGK

SEQ ID NO: 1342 - protein, 275 aa, synthetic construct
  REGION 1..275: note = LAG3 104-146 R129K-Fc
VGPGGLRSGRLPLQPRVQLDERGRQKGDFSLWLRPARRADAGEEPKSCDKTHTCPPCPAPELLGGPSVFLFPPKPKDTLMISRTPEVTCVVVDVSHEDPEVKFNWYVDGVEVHNAKTKPREEQYNSTYRVVSVLTVLHQDWLNGKEYKCKVSNKALPAPIEKTISKAKGQPREPQVYTLPPSRDELTKNQVSLTCLVKGFYPSDIAVEWESNGQPENNYKTTPPVLDSDGSFFLYSKLTVDKSRWQQGNVFSCSVMHEALHNHYTQKSLSLSPGK

SEQ ID NO: 1343 - protein, 275 aa, synthetic construct
  REGION 1..275: note = LAG3 104-146 G130P-Fc
VGPGGLRSGRLPLQPRVQLDERGRQRPDFSLWLRPARRADAGEEPKSCDKTHTCPPCPAPELLGGPSVFLFPPKPKDTLMISRTPEVTCVVVDVSHEDPEVKFNWYVDGVEVHNAKTKPREEQYNSTYRVVSVLTVLHQDWLNGKEYKCKVSNKALPAPIEKTISKAKGQPREPQVYTLPPSRDELTKNQVSLTCLVKGFYPSDIAVEWESNGQPENNYKTTPPVLDSDGSFFLYSKLTVDKSRWQQGNVFSCSVMHEALHNHYTQKSLSLSPGK

SEQ ID NO: 1344 - protein, 275 aa, synthetic construct
  REGION 1..275: note = LAG3 104-146 G130A-Fc
VGPGGLRSGRLPLQPRVQLDERGRQRADFSLWLRPARRADAGEEPKSCDKTHTCPPCPAPELLGGPSVFLFPPKPKDTLMISRTPEVTCVVVDVSHEDPEVKFNWYVDGVEVHNAKTKPREEQYNSTYRVVSVLTVLHQDWLNGKEYKCKVSNKALPAPIEKTISKAKGQPREPQVYTLPPSRDELTKNQVSLTCLVKGFYPSDIAVEWESNGQPENNYKTTPPVLDSDGSFFLYSKLTVDKSRWQQGNVFSCSVMHEALHNHYTQKSLSLSPGK

SEQ ID NO: 1345 - protein, 275 aa, synthetic construct
  REGION 1..275: note = LAG3 104-146 G130T-Fc
VGPGGLRSGRLPLQPRVQLDERGRQRTDFSLWLRPARRADAGEEPKSCDKTHTCPPCPAPELLGGPSVFLFPPKPKDTLMISRTPEVTCVVVDVSHEDPEVKFNWYVDGVEVHNAKTKPREEQYNSTYRVVSVLTVLHQDWLNGKEYKCKVSNKALPAPIEKTISKAKGQPREPQVYTLPPSRDELTKNQVSLTCLVKGFYPSDIAVEWESNGQPENNYKTTPPVLDSDGSFFLYSKLTVDKSRWQQGNVFSCSVMHEALHNHYTQKSLSLSPGK

SEQ ID NO: 1346 - protein, 275 aa, synthetic construct
  REGION 1..275: note = LAG3 104-146 G130Y-Fc
VGPGGLRSGRLPLQPRVQLDERGRQRYDFSLWLRPARRADAGEEPKSCDKTHTCPPCPAPELLGGPSVFLFPPKPKDTLMISRTPEVTCVVVDVSHEDPEVKFNWYVDGVEVHNAKTKPREEQYNSTYRVVSVLTVLHQDWLNGKEYKCKVSNKALPAPIEKTISKAKGQPREPQVYTLPPSRDELTKNQVSLTCLVKGFYPSDIAVEWESNGQPENNYKTTPPVLDSDGSFFLYSKLTVDKSRWQQGNVFSCSVMHEALHNHYTQKSLSLSPGK

SEQ ID NO: 1347 - protein, 275 aa, synthetic construct
  REGION 1..275: note = LAG3 104-146 G130S-Fc
VGPGGLRSGRLPLQPRVQLDERGRQRSDFSLWLRPARRADAGEEPKSCDKTHTCPPCPAPELLGGPSVFLFPPKPKDTLMISRTPEVTCVVVDVSHEDPEVKFNWYVDGVEVHNAKTKPREEQYNSTYRVVSVLTVLHQDWLNGKEYKCKVSNKALPAPIEKTISKAKGQPREPQVYTLPPSRDELTKNQVSLTCLVKGFYPSDIAVEWESNGQPENNYKTTPPVLDSDGSFFLYSKLTVDKSRWQQGNVFSCSVMHEALHNHYTQKSLSLSPGK

SEQ ID NO: 1348 - protein, 275 aa, synthetic construct
  REGION 1..275: note = LAG3 104-146 R141K-Fc
VGPGGLRSGRLPLQPRVQLDERGRQRGDFSLWLRPARKADAGEEPKSCDKTHTCPPCPAPELLGGPSVFLFPPKPKDTLMISRTPEVTCVVVDVSHEDPEVKFNWYVDGVEVHNAKTKPREEQYNSTYRVVSVLTVLHQDWLNGKEYKCKVSNKALPAPIEKTISKAKGQPREPQVYTLPPSRDELTKNQVSLTCLVKGFYPSDIAVEWESNGQPENNYKTTPPVLDSDGSFFLYSKLTVDKSRWQQGNVFSCSVMHEALHNHYTQKSLSLSPGK

SEQ ID NO: 1349 - protein, 275 aa, synthetic construct
  REGION 1..275: note = LAG3 104-146 R110K/G130P-Fc
VGPGGLKSGRLPLQPRVQLDERGRQRPDFSLWLRPARRADAGEEPKSCDKTHTCPPCPAPELLGGPSVFLFPPKPKDTLMISRTPEVTCVVVDVSHEDPEVKFNWYVDGVEVHNAKTKPREEQYNSTYRVVSVLTVLHQDWLNGKEYKCKVSNKALPAPIEKTISKAKGQPREPQVYTLPPSRDELTKNQVSLTCLVKGFYPSDIAVEWESNGQPENNYKTTPPVLDSDGSFFLYSKLTVDKSRWQQGNVFSCSVMHEALHNHYTQKSLSLSPGK

SEQ ID NO: 1350 - protein, 275 aa, synthetic construct
  REGION 1..275: note = LAG3 104-146 G130P/R141K-Fc
VGPGGLRSGRLPLQPRVQLDERGRQRPDFSLWLRPARKADAGEEPKSCDKTHTCPPCPAPELLGGPSVFLFPPKPKDTLMISRTPEVTCVVVDVSHEDPEVKFNWYVDGVEVHNAKTKPREEQYNSTYRVVSVLTVLHQDWLNGKEYKCKVSNKALPAPIEKTISKAKGQPREPQVYTLPPSRDELTKNQVSLTCLVKGFYPSDIAVEWESNGQPENNYKTTPPVLDSDGSFFLYSKLTVDKSRWQQGNVFSCSVMHEALHNHYTQKSLSLSPGK

SEQ ID NO: 1351 - protein, 275 aa, synthetic construct
  REGION 1..275: note = LAG3 104-146 R110K/R141K-Fc
VGPGGLKSGRLPLQPRVQLDERGRQRGDFSLWLRPARKADAGEEPKSCDKTHTCPPCPAPELLGGPSVFLFPPKPKDTLMISRTPEVTCVVVDVSHEDPEVKFNWYVDGVEVHNAKTKPREEQYNSTYRVVSVLTVLHQDWLNGKEYKCKVSNKALPAPIEKTISKAKGQPREPQVYTLPPSRDELTKNQVSLTCLVKGFYPSDIAVEWESNGQPENNYKTTPPVLDSDGSFFLYSKLTVDKSRWQQGNVFSCSVMHEALHNHYTQKSLSLSPGK

SEQ ID NO: 1352 - protein, 275 aa, synthetic construct
  REGION 1..275: note = LAG3 104-146 R110K/G130P/R141K-Fc
VGPGGLKSGRLPLQPRVQLDERGRQRPDFSLWLRPARKADAGEEPKSCDKTHTCPPCPAPELLGGPSVFLFPPKPKDTLMISRTPEVTCVVVDVSHEDPEVKFNWYVDGVEVHNAKTKPREEQYNSTYRVVSVLTVLHQDWLNGKEYKCKVSNKALPAPIEKTISKAKGQPREPQVYTLPPSRDELTKNQVSLTCLVKGFYPSDIAVEWESNGQPENNYKTTPPVLDSDGSFFLYSKLTVDKSRWQQGNVFSCSVMHEALHNHYTQKSLSLSPGK

SEQ ID NO: 1353 - protein, 487 aa, synthetic construct
  REGION 1..487: note = LAG3 104-121 R110K-Sugemalimab
VGPGGLKSGRLPLQPRVQGGGGSGGGGSGGGGSGGGGSGEVQLLESGGGLVQPGGSLRLSCAASGFTFSSYAMSWVRQAPGKGLEWVSGISGSGGFTYYADSVKGRFTISRDNSKNTLYLQMNSLRAEDTAVYYCAKPPRGYNYGPFDYWGQGTLVTVSSASTKGPSVFPLAPCSRSTSESTAALGCLVKDYFPEPVTVSWNSGALTSGVHTFPAVLQSSGLYSLSSVVTVPSSSLGTKTYTCNVDHKPSNTKVDKRVESKYGPPCPPCPAPEFLGGPSVFLFPPKPKDTLMISRTPEVTCVVVDVSQEDPEVQFNWYVDGVEVHNAKTKPREEQFNSTYRVVSVLTVLHQDWLNGKEYKCKVSNKGLPSSIEKTISKAKGQPREPQVYTLPPSQEEMTKNQVSLTCLVKGFYPSDIAVEWESNGQPENNYKTTPPVLDSDGSFFLYSRLTVDKSRWQEGNVFSCSVMHEALHNHYTQKSLSLSLGK

SEQ ID NO: 1354 - protein, 487 aa, synthetic construct
  REGION 1..487: note = LAG3 104-121 R113K-Sugemalimab
VGPGGLRSGKLPLQPRVQGGGGSGGGGSGGGGSGGGGSGEVQLLESGGGLVQPGGSLRLSCAASGFTFSSYAMSWVRQAPGKGLEWVSGISGSGGFTYYADSVKGRFTISRDNSKNTLYLQMNSLRAEDTAVYYCAKPPRGYNYGPFDYWGQGTLVTVSSASTKGPSVFPLAPCSRSTSESTAALGCLVKDYFPEPVTVSWNSGALTSGVHTFPAVLQSSGLYSLSSVVTVPSSSLGTKTYTCNVDHKPSNTKVDKRVESKYGPPCPPCPAPEFLGGPSVFLFPPKPKDTLMISRTPEVTCVVVDVSQEDPEVQFNWYVDGVEVHNAKTKPREEQFNSTYRVVSVLTVLHQDWLNGKEYKCKVSNKGLPSSIEKTISKAKGQPREPQVYTLPPSQEEMTKNQVSLTCLVKGFYPSDIAVEWESNGQPENNYKTTPPVLDSDGSFFLYSRLTVDKSRWQEGNVFSCSVMHEALHNHYTQKSLSLSLGK

SEQ ID NO: 1355 - protein, 487 aa, synthetic construct
  REGION 1..487: note = LAG3 104-121 R110K/R113K-Sugemalimab
VGPGGLKSGKLPLQPRVQGGGGSGGGGSGGGGSGGGGSGEVQLLESGGGLVQPGGSLRLSCAASGFTFSSYAMSWVRQAPGKGLEWVSGISGSGGFTYYADSVKGRFTISRDNSKNTLYLQMNSLRAEDTAVYYCAKPPRGYNYGPFDYWGQGTLVTVSSASTKGPSVFPLAPCSRSTSESTAALGCLVKDYFPEPVTVSWNSGALTSGVHTFPAVLQSSGLYSLSSVVTVPSSSLGTKTYTCNVDHKPSNTKVDKRVESKYGPPCPPCPAPEFLGGPSVFLFPPKPKDTLMISRTPEVTCVVVDVSQEDPEVQFNWYVDGVEVHNAKTKPREEQFNSTYRVVSVLTVLHQDWLNGKEYKCKVSNKGLPSSIEKTISKAKGQPREPQVYTLPPSQEEMTKNQVSLTCLVKGFYPSDIAVEWESNGQPENNYKTTPPVLDSDGSFFLYSRLTVDKSRWQEGNVFSCSVMHEALHNHYTQKSLSLSLGK

SEQ ID NO: 1356 - protein, 487 aa, synthetic construct
  REGION 1..487: note = LAG3 104-121 R119K-Sugemalimab
VGPGGLRSGRLPLQPKVQGGGGSGGGGSGGGGSGGGGSGEVQLLESGGGLVQPGGSLRLSCAASGFTFSSYAMSWVRQAPGKGLEWVSGISGSGGFTYYADSVKGRFTISRDNSKNTLYLQMNSLRAEDTAVYYCAKPPRGYNYGPFDYWGQGTLVTVSSASTKGPSVFPLAPCSRSTSESTAALGCLVKDYFPEPVTVSWNSGALTSGVHTFPAVLQSSGLYSLSSVVTVPSSSLGTKTYTCNVDHKPSNTKVDKRVESKYGPPCPPCPAPEFLGGPSVFLFPPKPKDTLMISRTPEVTCVVVDVSQEDPEVQFNWYVDGVEVHNAKTKPREEQFNSTYRVVSVLTVLHQDWLNGKEYKCKVSNKGLPSSIEKTISKAKGQPREPQVYTLPPSQEEMTKNQVSLTCLVKGFYPSDIAVEWESNGQPENNYKTTPPVLDSDGSFFLYSRLTVDKSRWQEGNVFSCSVMHEALHNHYTQKSLSLSLGK

SEQ ID NO: 1357 - protein, 487 aa, synthetic construct
  REGION 1..487: note = LAG3 104-121 R110K/R119K-Sugemalimab
VGPGGLKSGRLPLQPKVQGGGGSGGGGSGGGGSGGGGSGEVQLLESGGGLVQPGGSLRLSCAASGFTFSSYAMSWVRQAPGKGLEWVSGISGSGGFTYYADSVKGRFTISRDNSKNTLYLQMNSLRAEDTAVYYCAKPPRGYNYGPFDYWGQGTLVTVSSASTKGPSVFPLAPCSRSTSESTAALGCLVKDYFPEPVTVSWNSGALTSGVHTFPAVLQSSGLYSLSSVVTVPSSSLGTKTYTCNVDHKPSNTKVDKRVESKYGPPCPPCPAPEFLGGPSVFLFPPKPKDTLMISRTPEVTCVVVDVSQEDPEVQFNWYVDGVEVHNAKTKPREEQFNSTYRVVSVLTVLHQDWLNGKEYKCKVSNKGLPSSIEKTISKAKGQPREPQVYTLPPSQEEMTKNQVSLTCLVKGFYPSDIAVEWESNGQPENNYKTTPPVLDSDGSFFLYSRLTVDKSRWQEGNVFSCSVMHEALHNHYTQKSLSLSLGK

SEQ ID NO: 1358 - protein, 487 aa, synthetic construct
  REGION 1..487: note = LAG3 104-121 R113K/R119K-Sugemalimab
VGPGGLRSGKLPLQPKVQGGGGSGGGGSGGGGSGGGGSGEVQLLESGGGLVQPGGSLRLSCAASGFTFSSYAMSWVRQAPGKGLEWVSGISGSGGFTYYADSVKGRFTISRDNSKNTLYLQMNSLRAEDTAVYYCAKPPRGYNYGPFDYWGQGTLVTVSSASTKGPSVFPLAPCSRSTSESTAALGCLVKDYFPEPVTVSWNSGALTSGVHTFPAVLQSSGLYSLSSVVTVPSSSLGTKTYTCNVDHKPSNTKVDKRVESKYGPPCPPCPAPEFLGGPSVFLFPPKPKDTLMISRTPEVTCVVVDVSQEDPEVQFNWYVDGVEVHNAKTKPREEQFNSTYRVVSVLTVLHQDWLNGKEYKCKVSNKGLPSSIEKTISKAKGQPREPQVYTLPPSQEEMTKNQVSLTCLVKGFYPSDIAVEWESNGQPENNYKTTPPVLDSDGSFFLYSRLTVDKSRWQEGNVFSCSVMHEALHNHYTQKSLSLSLGK

SEQ ID NO: 1359 - protein, 487 aa, synthetic construct
  REGION 1..487: note = LAG3 104-121 R110K/R113K/R119K-Sugemalimab
VGPGGLKSGKLPLQPKVQGGGGSGGGGSGGGGSGGGGSGEVQLLESGGGLVQPGGSLRLSCAASGFTFSSYAMSWVRQAPGKGLEWVSGISGSGGFTYYADSVKGRFTISRDNSKNTLYLQMNSLRAEDTAVYYCAKPPRGYNYGPFDYWGQGTLVTVSSASTKGPSVFPLAPCSRSTSESTAALGCLVKDYFPEPVTVSWNSGALTSGVHTFPAVLQSSGLYSLSSVVTVPSSSLGTKTYTCNVDHKPSNTKVDKRVESKYGPPCPPCPAPEFLGGPSVFLFPPKPKDTLMISRTPEVTCVVVDVSQEDPEVQFNWYVDGVEVHNAKTKPREEQFNSTYRVVSVLTVLHQDWLNGKEYKCKVSNKGLPSSIEKTISKAKGQPREPQVYTLPPSQEEMTKNQVSLTCLVKGFYPSDIAVEWESNGQPENNYKTTPPVLDSDGSFFLYSRLTVDKSRWQEGNVFSCSVMHEALHNHYTQKSLSLSLGK

SEQ ID NO: 1360 - protein, 494 aa, synthetic construct
  REGION 1..494: note = LAG3 122-146 R129K-Sugemalimab
LDERGRQKGDFSLWLRPARRADAGEGGGGSGGGGSGGGGSGGGGSGEVQLLESGGGLVQPGGSLRLSCAASGFTFSSYAMSWVRQAPGKGLEWVSGISGSGGFTYYADSVKGRFTISRDNSKNTLYLQMNSLRAEDTAVYYCAKPPRGYNYGPFDYWGQGTLVTVSSASTKGPSVFPLAPCSRSTSESTAALGCLVKDYFPEPVTVSWNSGALTSGVHTFPAVLQSSGLYSLSSVVTVPSSSLGTKTYTCNVDHKPSNTKVDKRVESKYGPPCPPCPAPEFLGGPSVFLFPPKPKDTLMISRTPEVTCVVVDVSQEDPEVQFNWYVDGVEVHNAKTKPREEQFNSTYRVVSVLTVLHQDWLNGKEYKCKVSNKGLPSSIEKTISKAKGQPREPQVYTLPPSQEEMTKNQVSLTCLVKGFYPSDIAVEWESNGQPENNYKTTPPVLDSDGSFFLYSRLTVDKSRWQEGNVFSCSVMHEALHNHYTQKSLSLSLGK

SEQ ID NO: 1361 - protein, 494 aa, synthetic construct
  REGION 1..494: note = LAG3 122-146 G130P-Sugemalimab
LDERGRQRPDFSLWLRPARRADAGEGGGGSGGGGSGGGGSGGGGSGEVQLLESGGGLVQPGGSLRLSCAASGFTFSSYAMSWVRQAPGKGLEWVSGISGSGGFTYYADSVKGRFTISRDNSKNTLYLQMNSLRAEDTAVYYCAKPPRGYNYGPFDYWGQGTLVTVSSASTKGPSVFPLAPCSRSTSESTAALGCLVKDYFPEPVTVSWNSGALTSGVHTFPAVLQSSGLYSLSSVVTVPSSSLGTKTYTCNVDHKPSNTKVDKRVESKYGPPCPPCPAPEFLGGPSVFLFPPKPKDTLMISRTPEVTCVVVDVSQEDPEVQFNWYVDGVEVHNAKTKPREEQFNSTYRVVSVLTVLHQDWLNGKEYKCKVSNKGLPSSIEKTISKAKGQPREPQVYTLPPSQEEMTKNQVSLTCLVKGFYPSDIAVEWESNGQPENNYKTTPPVLDSDGSFFLYSRLTVDKSRWQEGNVFSCSVMHEALHNHYTQKSLSLSLGK

SEQ ID NO: 1362 - protein, 494 aa, synthetic construct
  REGION 1..494: note = LAG3 122-146 G130A-Sugemalimab
LDERGRQRADFSLWLRPARRADAGEGGGGSGGGGSGGGGSGGGGSGEVQLLESGGGLVQPGGSLRLSCAASGFTFSSYAMSWVRQAPGKGLEWVSGISGSGGFTYYADSVKGRFTISRDNSKNTLYLQMNSLRAEDTAVYYCAKPPRGYNYGPFDYWGQGTLVTVSSASTKGPSVFPLAPCSRSTSESTAALGCLVKDYFPEPVTVSWNSGALTSGVHTFPAVLQSSGLYSLSSVVTVPSSSLGTKTYTCNVDHKPSNTKVDKRVESKYGPPCPPCPAPEFLGGPSVFLFPPKPKDTLMISRTPEVTCVVVDVSQEDPEVQFNWYVDGVEVHNAKTKPREEQFNSTYRVVSVLTVLHQDWLNGKEYKCKVSNKGLPSSIEKTISKAKGQPREPQVYTLPPSQEEMTKNQVSLTCLVKGFYPSDIAVEWESNGQPENNYKTTPPVLDSDGSFFLYSRLTVDKSRWQEGNVFSCSVMHEALHNHYTQKSLSLSLGK

SEQ ID NO: 1363 - protein, 494 aa, synthetic construct
  REGION 1..494: note = LAG3 122-146 G130T-Sugemalimab
LDERGRQRTDFSLWLRPARRADAGEGGGGSGGGGSGGGGSGGGGSGEVQLLESGGGLVQPGGSLRLSCAASGFTFSSYAMSWVRQAPGKGLEWVSGISGSGGFTYYADSVKGRFTISRDNSKNTLYLQMNSLRAEDTAVYYCAKPPRGYNYGPFDYWGQGTLVTVSSASTKGPSVFPLAPCSRSTSESTAALGCLVKDYFPEPVTVSWNSGALTSGVHTFPAVLQSSGLYSLSSVVTVPSSSLGTKTYTCNVDHKPSNTKVDKRVESKYGPPCPPCPAPEFLGGPSVFLFPPKPKDTLMISRTPEVTCVVVDVSQEDPEVQFNWYVDGVEVHNAKTKPREEQFNSTYRVVSVLTVLHQDWLNGKEYKCKVSNKGLPSSIEKTISKAKGQPREPQVYTLPPSQEEMTKNQVSLTCLVKGFYPSDIAVEWESNGQPENNYKTTPPVLDSDGSFFLYSRLTVDKSRWQEGNVFSCSVMHEALHNHYTQKSLSLSLGK

SEQ ID NO: 1364 - protein, 494 aa, synthetic construct
  REGION 1..494: note = LAG3 122-146 G130Y-Sugemalimab
LDERGRQRYDFSLWLRPARRADAGEGGGGSGGGGSGGGGSGGGGSGEVQLLESGGGLVQPGGSLRLSCAASGFTFSSYAMSWVRQAPGKGLEWVSGISGSGGFTYYADSVKGRFTISRDNSKNTLYLQMNSLRAEDTAVYYCAKPPRGYNYGPFDYWGQGTLVTVSSASTKGPSVFPLAPCSRSTSESTAALGCLVKDYFPEPVTVSWNSGALTSGVHTFPAVLQSSGLYSLSSVVTVPSSSLGTKTYTCNVDHKPSNTKVDKRVESKYGPPCPPCPAPEFLGGPSVFLFPPKPKDTLMISRTPEVTCVVVDVSQEDPEVQFNWYVDGVEVHNAKTKPREEQFNSTYRVVSVLTVLHQDWLNGKEYKCKVSNKGLPSSIEKTISKAKGQPREPQVYTLPPSQEEMTKNQVSLTCLVKGFYPSDIAVEWESNGQPENNYKTTPPVLDSDGSFFLYSRLTVDKSRWQEGNVFSCSVMHEALHNHYTQKSLSLSLGK

SEQ ID NO: 1365 - protein, 494 aa, synthetic construct
  REGION 1..494: note = LAG3 122-146 G130S-Sugemalimab
LDERGRQRSDFSLWLRPARRADAGEGGGGSGGGGSGGGGSGGGGSGEVQLLESGGGLVQPGGSLRLSCAASGFTFSSYAMSWVRQAPGKGLEWVSGISGSGGFTYYADSVKGRFTISRDNSKNTLYLQMNSLRAEDTAVYYCAKPPRGYNYGPFDYWGQGTLVTVSSASTKGPSVFPLAPCSRSTSESTAALGCLVKDYFPEPVTVSWNSGALTSGVHTFPAVLQSSGLYSLSSVVTVPSSSLGTKTYTCNVDHKPSNTKVDKRVESKYGPPCPPCPAPEFLGGPSVFLFPPKPKDTLMISRTPEVTCVVVDVSQEDPEVQFNWYVDGVEVHNAKTKPREEQFNSTYRVVSVLTVLHQDWLNGKEYKCKVSNKGLPSSIEKTISKAKGQPREPQVYTLPPSQEEMTKNQVSLTCLVKGFYPSDIAVEWESNGQPENNYKTTPPVLDSDGSFFLYSRLTVDKSRWQEGNVFSCSVMHEALHNHYTQKSLSLSLGK

SEQ ID NO: 1366 - protein, 494 aa, synthetic construct
  REGION 1..494: note = LAG3 122-146 R141K-Sugemalimab
LDERGRQRGDFSLWLRPARKADAGEGGGGSGGGGSGGGGSGGGGSGEVQLLESGGGLVQPGGSLRLSCAASGFTFSSYAMSWVRQAPGKGLEWVSGISGSGGFTYYADSVKGRFTISRDNSKNTLYLQMNSLRAEDTAVYYCAKPPRGYNYGPFDYWGQGTLVTVSSASTKGPSVFPLAPCSRSTSESTAALGCLVKDYFPEPVTVSWNSGALTSGVHTFPAVLQSSGLYSLSSVVTVPSSSLGTKTYTCNVDHKPSNTKVDKRVESKYGPPCPPCPAPEFLGGPSVFLFPPKPKDTLMISRTPEVTCVVVDVSQEDPEVQFNWYVDGVEVHNAKTKPREEQFNSTYRVVSVLTVLHQDWLNGKEYKCKVSNKGLPSSIEKTISKAKGQPREPQVYTLPPSQEEMTKNQVSLTCLVKGFYPSDIAVEWESNGQPENNYKTTPPVLDSDGSFFLYSRLTVDKSRWQEGNVFSCSVMHEALHNHYTQKSLSLSLGK

SEQ ID NO: 1367 - protein, 494 aa, synthetic construct
  REGION 1..494: note = LAG3 122-146 R129K/G130P-Sugemalimab
LDERGRQKPDFSLWLRPARRADAGEGGGGSGGGGSGGGGSGGGGSGEVQLLESGGGLVQPGGSLRLSCAASGFTFSSYAMSWVRQAPGKGLEWVSGISGSGGFTYYADSVKGRFTISRDNSKNTLYLQMNSLRAEDTAVYYCAKPPRGYNYGPFDYWGQGTLVTVSSASTKGPSVFPLAPCSRSTSESTAALGCLVKDYFPEPVTVSWNSGALTSGVHTFPAVLQSSGLYSLSSVVTVPSSSLGTKTYTCNVDHKPSNTKVDKRVESKYGPPCPPCPAPEFLGGPSVFLFPPKPKDTLMISRTPEVTCVVVDVSQEDPEVQFNWYVDGVEVHNAKTKPREEQFNSTYRVVSVLTVLHQDWLNGKEYKCKVSNKGLPSSIEKTISKAKGQPREPQVYTLPPSQEEMTKNQVSLTCLVKGFYPSDIAVEWESNGQPENNYKTTPPVLDSDGSFFLYSRLTVDKSRWQEGNVFSCSVMHEALHNHYTQKSLSLSLGK

SEQ ID NO: 1368 - protein, 494 aa, synthetic construct
  REGION 1..494: note = LAG3 122-146 R129K/R141K-Sugemalimab
LDERGRQKGDFSLWLRPARKADAGEGGGGSGGGGSGGGGSGGGGSGEVQLLESGGGLVQPGGSLRLSCAASGFTFSSYAMSWVRQAPGKGLEWVSGISGSGGFTYYADSVKGRFTISRDNSKNTLYLQMNSLRAEDTAVYYCAKPPRGYNYGPFDYWGQGTLVTVSSASTKGPSVFPLAPCSRSTSESTAALGCLVKDYFPEPVTVSWNSGALTSGVHTFPAVLQSSGLYSLSSVVTVPSSSLGTKTYTCNVDHKPSNTKVDKRVESKYGPPCPPCPAPEFLGGPSVFLFPPKPKDTLMISRTPEVTCVVVDVSQEDPEVQFNWYVDGVEVHNAKTKPREEQFNSTYRVVSVLTVLHQDWLNGKEYKCKVSNKGLPSSIEKTISKAKGQPREPQVYTLPPSQEEMTKNQVSLTCLVKGFYPSDIAVEWESNGQPENNYKTTPPVLDSDGSFFLYSRLTVDKSRWQEGNVFSCSVMHEALHNHYTQKSLSLSLGK

SEQ ID NO: 1369 - protein, 494 aa, synthetic construct
  REGION 1..494: note = LAG3 122-146 G130P/R141K-Sugemalimab
LDERGRQRPDFSLWLRPARKADAGEGGGGSGGGGSGGGGSGGGGSGEVQLLESGGGLVQPGGSLRLSCAASGFTFSSYAMSWVRQAPGKGLEWVSGISGSGGFTYYADSVKGRFTISRDNSKNTLYLQMNSLRAEDTAVYYCAKPPRGYNYGPFDYWGQGTLVTVSSASTKGPSVFPLAPCSRSTSESTAALGCLVKDYFPEPVTVSWNSGALTSGVHTFPAVLQSSGLYSLSSVVTVPSSSLGTKTYTCNVDHKPSNTKVDKRVESKYGPPCPPCPAPEFLGGPSVFLFPPKPKDTLMISRTPEVTCVVVDVSQEDPEVQFNWYVDGVEVHNAKTKPREEQFNSTYRVVSVLTVLHQDWLNGKEYKCKVSNKGLPSSIEKTISKAKGQPREPQVYTLPPSQEEMTKNQVSLTCLVKGFYPSDIAVEWESNGQPENNYKTTPPVLDSDGSFFLYSRLTVDKSRWQEGNVFSCSVMHEALHNHYTQKSLSLSLGK

SEQ ID NO: 1370 - protein, 494 aa, synthetic construct
  REGION 1..494: note = LAG3 122-146 G130A/R141K-Sugemalimab
LDERGRQRADFSLWLRPARKADAGEGGGGSGGGGSGGGGSGGGGSGEVQLLESGGGLVQPGGSLRLSCAASGFTFSSYAMSWVRQAPGKGLEWVSGISGSGGFTYYADSVKGRFTISRDNSKNTLYLQMNSLRAEDTAVYYCAKPPRGYNYGPFDYWGQGTLVTVSSASTKGPSVFPLAPCSRSTSESTAALGCLVKDYFPEPVTVSWNSGALTSGVHTFPAVLQSSGLYSLSSVVTVPSSSLGTKTYTCNVDHKPSNTKVDKRVESKYGPPCPPCPAPEFLGGPSVFLFPPKPKDTLMISRTPEVTCVVVDVSQEDPEVQFNWYVDGVEVHNAKTKPREEQFNSTYRVVSVLTVLHQDWLNGKEYKCKVSNKGLPSSIEKTISKAKGQPREPQVYTLPPSQEEMTKNQVSLTCLVKGFYPSDIAVEWESNGQPENNYKTTPPVLDSDGSFFLYSRLTVDKSRWQEGNVFSCSVMHEALHNHYTQKSLSLSLGK

SEQ ID NO: 1371 - protein, 494 aa, synthetic construct
  REGION 1..494: note = LAG3 122-146 G130T/R141K-Sugemalimab
LDERGRQRTDFSLWLRPARKADAGEGGGGSGGGGSGGGGSGGGGSGEVQLLESGGGLVQPGGSLRLSCAASGFTFSSYAMSWVRQAPGKGLEWVSGISGSGGFTYYADSVKGRFTISRDNSKNTLYLQMNSLRAEDTAVYYCAKPPRGYNYGPFDYWGQGTLVTVSSASTKGPSVFPLAPCSRSTSESTAALGCLVKDYFPEPVTVSWNSGALTSGVHTFPAVLQSSGLYSLSSVVTVPSSSLGTKTYTCNVDHKPSNTKVDKRVESKYGPPCPPCPAPEFLGGPSVFLFPPKPKDTLMISRTPEVTCVVVDVSQEDPEVQFNWYVDGVEVHNAKTKPREEQFNSTYRVVSVLTVLHQDWLNGKEYKCKVSNKGLPSSIEKTISKAKGQPREPQVYTLPPSQEEMTKNQVSLTCLVKGFYPSDIAVEWESNGQPENNYKTTPPVLDSDGSFFLYSRLTVDKSRWQEGNVFSCSVMHEALHNHYTQKSLSLSLGK

SEQ ID NO: 1372 - protein, 494 aa, synthetic construct
  REGION 1..494: note = LAG3 122-146 G130Y/R141K-Sugemalimab
LDERGRQRYDFSLWLRPARKADAGEGGGGSGGGGSGGGGSGGGGSGEVQLLESGGGLVQPGGSLRLSCAASGFTFSSYAMSWVRQAPGKGLEWVSGISGSGGFTYYADSVKGRFTISRDNSKNTLYLQMNSLRAEDTAVYYCAKPPRGYNYGPFDYWGQGTLVTVSSASTKGPSVFPLAPCSRSTSESTAALGCLVKDYFPEPVTVSWNSGALTSGVHTFPAVLQSSGLYSLSSVVTVPSSSLGTKTYTCNVDHKPSNTKVDKRVESKYGPPCPPCPAPEFLGGPSVFLFPPKPKDTLMISRTPEVTCVVVDVSQEDPEVQFNWYVDGVEVHNAKTKPREEQFNSTYRVVSVLTVLHQDWLNGKEYKCKVSNKGLPSSIEKTISKAKGQPREPQVYTLPPSQEEMTKNQVSLTCLVKGFYPSDIAVEWESNGQPENNYKTTPPVLDSDGSFFLYSRLTVDKSRWQEGNVFSCSVMHEALHNHYTQKSLSLSLGK

SEQ ID NO: 1373 - protein, 494 aa, synthetic construct
  REGION 1..494: note = LAG3 122-146 G130S/R141K-Sugemalimab
LDERGRQRSDFSLWLRPARKADAGEGGGGSGGGGSGGGGSGGGGSGEVQLLESGGGLVQPGGSLRLSCAASGFTFSSYAMSWVRQAPGKGLEWVSGISGSGGFTYYADSVKGRFTISRDNSKNTLYLQMNSLRAEDTAVYYCAKPPRGYNYGPFDYWGQGTLVTVSSASTKGPSVFPLAPCSRSTSESTAALGCLVKDYFPEPVTVSWNSGALTSGVHTFPAVLQSSGLYSLSSVVTVPSSSLGTKTYTCNVDHKPSNTKVDKRVESKYGPPCPPCPAPEFLGGPSVFLFPPKPKDTLMISRTPEVTCVVVDVSQEDPEVQFNWYVDGVEVHNAKTKPREEQFNSTYRVVSVLTVLHQDWLNGKEYKCKVSNKGLPSSIEKTISKAKGQPREPQVYTLPPSQEEMTKNQVSLTCLVKGFYPSDIAVEWESNGQPENNYKTTPPVLDSDGSFFLYSRLTVDKSRWQEGNVFSCSVMHEALHNHYTQKSLSLSLGK

SEQ ID NO: 1374 - protein, 512 aa, synthetic construct
  REGION 1..512: note = LAG3 104-146 R110K-Sugemalimab
VGPGGLKSGRLPLQPRVQLDERGRQRGDFSLWLRPARRADAGEGGGGSGGGGSGGGGSGGGGSGEVQLLESGGGLVQPGGSLRLSCAASGFTFSSYAMSWVRQAPGKGLEWVSGISGSGGFTYYADSVKGRFTISRDNSKNTLYLQMNSLRAEDTAVYYCAKPPRGYNYGPFDYWGQGTLVTVSSASTKGPSVFPLAPCSRSTSESTAALGCLVKDYFPEPVTVSWNSGALTSGVHTFPAVLQSSGLYSLSSVVTVPSSSLGTKTYTCNVDHKPSNTKVDKRVESKYGPPCPPCPAPEFLGGPSVFLFPPKPKDTLMISRTPEVTCVVVDVSQEDPEVQFNWYVDGVEVHNAKTKPREEQFNSTYRVVSVLTVLHQDWLNGKEYKCKVSNKGLPSSIEKTISKAKGQPREPQVYTLPPSQEEMTKNQVSLTCLVKGFYPSDIAVEWESNGQPENNYKTTPPVLDSDGSFFLYSRLTVDKSRWQEGNVFSCSVMHEALHNHYTQKSLSLSLGK

SEQ ID NO: 1375 - protein, 512 aa, synthetic construct
  REGION 1..512: note = LAG3 104-146 R113K-Sugemalimab
VGPGGLRSGKLPLQPRVQLDERGRQRGDFSLWLRPARRADAGEGGGGSGGGGSGGGGSGGGGSGEVQLLESGGGLVQPGGSLRLSCAASGFTFSSYAMSWVRQAPGKGLEWVSGISGSGGFTYYADSVKGRFTISRDNSKNTLYLQMNSLRAEDTAVYYCAKPPRGYNYGPFDYWGQGTLVTVSSASTKGPSVFPLAPCSRSTSESTAALGCLVKDYFPEPVTVSWNSGALTSGVHTFPAVLQSSGLYSLSSVVTVPSSSLGTKTYTCNVDHKPSNTKVDKRVESKYGPPCPPCPAPEFLGGPSVFLFPPKPKDTLMISRTPEVTCVVVDVSQEDPEVQFNWYVDGVEVHNAKTKPREEQFNSTYRVVSVLTVLHQDWLNGKEYKCKVSNKGLPSSIEKTISKAKGQPREPQVYTLPPSQEEMTKNQVSLTCLVKGFYPSDIAVEWESNGQPENNYKTTPPVLDSDGSFFLYSRLTVDKSRWQEGNVFSCSVMHEALHNHYTQKSLSLSLGK

SEQ ID NO: 1376 - protein, 512 aa, synthetic construct
  REGION 1..512: note = LAG3 104-146 R129K-Sugemalimab
VGPGGLRSGRLPLQPRVQLDERGRQKGDFSLWLRPARRADAGEGGGGSGGGGSGGGGSGGGGSGEVQLLESGGGLVQPGGSLRLSCAASGFTFSSYAMSWVRQAPGKGLEWVSGISGSGGFTYYADSVKGRFTISRDNSKNTLYLQMNSLRAEDTAVYYCAKPPRGYNYGPFDYWGQGTLVTVSSASTKGPSVFPLAPCSRSTSESTAALGCLVKDYFPEPVTVSWNSGALTSGVHTFPAVLQSSGLYSLSSVVTVPSSSLGTKTYTCNVDHKPSNTKVDKRVESKYGPPCPPCPAPEFLGGPSVFLFPPKPKDTLMISRTPEVTCVVVDVSQEDPEVQFNWYVDGVEVHNAKTKPREEQFNSTYRVVSVLTVLHQDWLNGKEYKCKVSNKGLPSSIEKTISKAKGQPREPQVYTLPPSQEEMTKNQVSLTCLVKGFYPSDIAVEWESNGQPENNYKTTPPVLDSDGSFFLYSRLTVDKSRWQEGNVFSCSVMHEALHNHYTQKSLSLSLGK

SEQ ID NO: 1377 - protein, 512 aa, synthetic construct
  REGION 1..512: note = LAG3 104-146 G130P-Sugemalimab
VGPGGLRSGRLPLQPRVQLDERGRQRPDFSLWLRPARRADAGEGGGGSGGGGSGGGGSGGGGSGEVQLLESGGGLVQPGGSLRLSCAASGFTFSSYAMSWVRQAPGKGLEWVSGISGSGGFTYYADSVKGRFTISRDNSKNTLYLQMNSLRAEDTAVYYCAKPPRGYNYGPFDYWGQGTLVTVSSASTKGPSVFPLAPCSRSTSESTAALGCLVKDYFPEPVTVSWNSGALTSGVHTFPAVLQSSGLYSLSSVVTVPSSSLGTKTYTCNVDHKPSNTKVDKRVESKYGPPCPPCPAPEFLGGPSVFLFPPKPKDTLMISRTPEVTCVVVDVSQEDPEVQFNWYVDGVEVHNAKTKPREEQFNSTYRVVSVLTVLHQDWLNGKEYKCKVSNKGLPSSIEKTISKAKGQPREPQVYTLPPSQEEMTKNQVSLTCLVKGFYPSDIAVEWESNGQPENNYKTTPPVLDSDGSFFLYSRLTVDKSRWQEGNVFSCSVMHEALHNHYTQKSLSLSLGK

SEQ ID NO: 1378 - protein, 512 aa, synthetic construct
  REGION 1..512: note = LAG3 104-146 G130A-Sugemalimab
VGPGGLRSGRLPLQPRVQLDERGRQRADFSLWLRPARRADAGEGGGGSGGGGSGGGGSGGGGSGEVQLLESGGGLVQPGGSLRLSCAASGFTFSSYAMSWVRQAPGKGLEWVSGISGSGGFTYYADSVKGRFTISRDNSKNTLYLQMNSLRAEDTAVYYCAKPPRGYNYGPFDYWGQGTLVTVSSASTKGPSVFPLAPCSRSTSESTAALGCLVKDYFPEPVTVSWNSGALTSGVHTFPAVLQSSGLYSLSSVVTVPSSSLGTKTYTCNVDHKPSNTKVDKRVESKYGPPCPPCPAPEFLGGPSVFLFPPKPKDTLMISRTPEVTCVVVDVSQEDPEVQFNWYVDGVEVHNAKTKPREEQFNSTYRVVSVLTVLHQDWLNGKEYKCKVSNKGLPSSIEKTISKAKGQPREPQVYTLPPSQEEMTKNQVSLTCLVKGFYPSDIAVEWESNGQPENNYKTTPPVLDSDGSFFLYSRLTVDKSRWQEGNVFSCSVMHEALHNHYTQKSLSLSLGK

SEQ ID NO: 1379 - protein, 512 aa, synthetic construct
  REGION 1..512: note = LAG3 104-146 G130T-Sugemalimab
VGPGGLRSGRLPLQPRVQLDERGRQRTDFSLWLRPARRADAGEGGGGSGGGGSGGGGSGGGGSGEVQLLESGGGLVQPGGSLRLSCAASGFTFSSYAMSWVRQAPGKGLEWVSGISGSGGFTYYADSVKGRFTISRDNSKNTLYLQMNSLRAEDTAVYYCAKPPRGYNYGPFDYWGQGTLVTVSSASTKGPSVFPLAPCSRSTSESTAALGCLVKDYFPEPVTVSWNSGALTSGVHTFPAVLQSSGLYSLSSVVTVPSSSLGTKTYTCNVDHKPSNTKVDKRVESKYGPPCPPCPAPEFLGGPSVFLFPPKPKDTLMISRTPEVTCVVVDVSQEDPEVQFNWYVDGVEVHNAKTKPREEQFNSTYRVVSVLTVLHQDWLNGKEYKCKVSNKGLPSSIEKTISKAKGQPREPQVYTLPPSQEEMTKNQVSLTCLVKGFYPSDIAVEWESNGQPENNYKTTPPVLDSDGSFFLYSRLTVDKSRWQEGNVFSCSVMHEALHNHYTQKSLSLSLGK

SEQ ID NO: 1380 - protein, 512 aa, synthetic construct
  REGION 1..512: note = LAG3 104-146 G130Y-Sugemalimab
VGPGGLRSGRLPLQPRVQLDERGRQRYDFSLWLRPARRADAGEGGGGSGGGGSGGGGSGGGGSGEVQLLESGGGLVQPGGSLRLSCAASGFTFSSYAMSWVRQAPGKGLEWVSGISGSGGFTYYADSVKGRFTISRDNSKNTLYLQMNSLRAEDTAVYYCAKPPRGYNYGPFDYWGQGTLVTVSSASTKGPSVFPLAPCSRSTSESTAALGCLVKDYFPEPVTVSWNSGALTSGVHTFPAVLQSSGLYSLSSVVTVPSSSLGTKTYTCNVDHKPSNTKVDKRVESKYGPPCPPCPAPEFLGGPSVFLFPPKPKDTLMISRTPEVTCVVVDVSQEDPEVQFNWYVDGVEVHNAKTKPREEQFNSTYRVVSVLTVLHQDWLNGKEYKCKVSNKGLPSSIEKTISKAKGQPREPQVYTLPPSQEEMTKNQVSLTCLVKGFYPSDIAVEWESNGQPENNYKTTPPVLDSDGSFFLYSRLTVDKSRWQEGNVFSCSVMHEALHNHYTQKSLSLSLGK

SEQ ID NO: 1381 - protein, 512 aa, synthetic construct
  REGION 1..512: note = LAG3 104-146 G130S-Sugemalimab
VGPGGLRSGRLPLQPRVQLDERGRQRSDFSLWLRPARRADAGEGGGGSGGGGSGGGGSGGGGSGEVQLLESGGGLVQPGGSLRLSCAASGFTFSSYAMSWVRQAPGKGLEWVSGISGSGGFTYYADSVKGRFTISRDNSKNTLYLQMNSLRAEDTAVYYCAKPPRGYNYGPFDYWGQGTLVTVSSASTKGPSVFPLAPCSRSTSESTAALGCLVKDYFPEPVTVSWNSGALTSGVHTFPAVLQSSGLYSLSSVVTVPSSSLGTKTYTCNVDHKPSNTKVDKRVESKYGPPCPPCPAPEFLGGPSVFLFPPKPKDTLMISRTPEVTCVVVDVSQEDPEVQFNWYVDGVEVHNAKTKPREEQFNSTYRVVSVLTVLHQDWLNGKEYKCKVSNKGLPSSIEKTISKAKGQPREPQVYTLPPSQEEMTKNQVSLTCLVKGFYPSDIAVEWESNGQPENNYKTTPPVLDSDGSFFLYSRLTVDKSRWQEGNVFSCSVMHEALHNHYTQKSLSLSLGK

SEQ ID NO: 1382 - protein, 512 aa, synthetic construct
  REGION 1..512: note = LAG3 104-146 R141K-Sugemalimab
VGPGGLRSGRLPLQPRVQLDERGRQRGDFSLWLRPARKADAGEGGGGSGGGGSGGGGSGGGGSGEVQLLESGGGLVQPGGSLRLSCAASGFTFSSYAMSWVRQAPGKGLEWVSGISGSGGFTYYADSVKGRFTISRDNSKNTLYLQMNSLRAEDTAVYYCAKPPRGYNYGPFDYWGQGTLVTVSSASTKGPSVFPLAPCSRSTSESTAALGCLVKDYFPEPVTVSWNSGALTSGVHTFPAVLQSSGLYSLSSVVTVPSSSLGTKTYTCNVDHKPSNTKVDKRVESKYGPPCPPCPAPEFLGGPSVFLFPPKPKDTLMISRTPEVTCVVVDVSQEDPEVQFNWYVDGVEVHNAKTKPREEQFNSTYRVVSVLTVLHQDWLNGKEYKCKVSNKGLPSSIEKTISKAKGQPREPQVYTLPPSQEEMTKNQVSLTCLVKGFYPSDIAVEWESNGQPENNYKTTPPVLDSDGSFFLYSRLTVDKSRWQEGNVFSCSVMHEALHNHYTQKSLSLSLGK

SEQ ID NO: 1383 - protein, 512 aa, synthetic construct
  REGION 1..512: note = LAG3 104-146 R110K/G130P-Sugemalimab
VGPGGLKSGRLPLQPRVQLDERGRQRPDFSLWLRPARRADAGEGGGGSGGGGSGGGGSGGGGSGEVQLLESGGGLVQPGGSLRLSCAASGFTFSSYAMSWVRQAPGKGLEWVSGISGSGGFTYYADSVKGRFTISRDNSKNTLYLQMNSLRAEDTAVYYCAKPPRGYNYGPFDYWGQGTLVTVSSASTKGPSVFPLAPCSRSTSESTAALGCLVKDYFPEPVTVSWNSGALTSGVHTFPAVLQSSGLYSLSSVVTVPSSSLGTKTYTCNVDHKPSNTKVDKRVESKYGPPCPPCPAPEFLGGPSVFLFPPKPKDTLMISRTPEVTCVVVDVSQEDPEVQFNWYVDGVEVHNAKTKPREEQFNSTYRVVSVLTVLHQDWLNGKEYKCKVSNKGLPSSIEKTISKAKGQPREPQVYTLPPSQEEMTKNQVSLTCLVKGFYPSDIAVEWESNGQPENNYKTTPPVLDSDGSFFLYSRLTVDKSRWQEGNVFSCSVMHEALHNHYTQKSLSLSLGK

SEQ ID NO: 1384 - protein, 512 aa, synthetic construct
  REGION 1..512: note = LAG3 104-146 G130P/R141K-Sugemalimab
VGPGGLRSGRLPLQPRVQLDERGRQRPDFSLWLRPARKADAGEGGGGSGGGGSGGGGSGGGGSGEVQLLESGGGLVQPGGSLRLSCAASGFTFSSYAMSWVRQAPGKGLEWVSGISGSGGFTYYADSVKGRFTISRDNSKNTLYLQMNSLRAEDTAVYYCAKPPRGYNYGPFDYWGQGTLVTVSSASTKGPSVFPLAPCSRSTSESTAALGCLVKDYFPEPVTVSWNSGALTSGVHTFPAVLQSSGLYSLSSVVTVPSSSLGTKTYTCNVDHKPSNTKVDKRVESKYGPPCPPCPAPEFLGGPSVFLFPPKPKDTLMISRTPEVTCVVVDVSQEDPEVQFNWYVDGVEVHNAKTKPREEQFNSTYRVVSVLTVLHQDWLNGKEYKCKVSNKGLPSSIEKTISKAKGQPREPQVYTLPPSQEEMTKNQVSLTCLVKGFYPSDIAVEWESNGQPENNYKTTPPVLDSDGSFFLYSRLTVDKSRWQEGNVFSCSVMHEALHNHYTQKSLSLSLGK

SEQ ID NO: 1385 - protein, 512 aa, synthetic construct
  REGION 1..512: note = LAG3 104-146 R110K/R141K-Sugemalimab
VGPGGLKSGRLPLQPRVQLDERGRQRGDFSLWLRPARKADAGEGGGGSGGGGSGGGGSGGGGSGEVQLLESGGGLVQPGGSLRLSCAASGFTFSSYAMSWVRQAPGKGLEWVSGISGSGGFTYYADSVKGRFTISRDNSKNTLYLQMNSLRAEDTAVYYCAKPPRGYNYGPFDYWGQGTLVTVSSASTKGPSVFPLAPCSRSTSESTAALGCLVKDYFPEPVTVSWNSGALTSGVHTFPAVLQSSGLYSLSSVVTVPSSSLGTKTYTCNVDHKPSNTKVDKRVESKYGPPCPPCPAPEFLGGPSVFLFPPKPKDTLMISRTPEVTCVVVDVSQEDPEVQFNWYVDGVEVHNAKTKPREEQFNSTYRVVSVLTVLHQDWLNGKEYKCKVSNKGLPSSIEKTISKAKGQPREPQVYTLPPSQEEMTKNQVSLTCLVKGFYPSDIAVEWESNGQPENNYKTTPPVLDSDGSFFLYSRLTVDKSRWQEGNVFSCSVMHEALHNHYTQKSLSLSLGK

SEQ ID NO: 1386 - protein, 512 aa, synthetic construct
  REGION 1..512: note = LAG3 104-146 R110K/G130P/R141K-Sugemalimab
VGPGGLKSGRLPLQPRVQLDERGRQRPDFSLWLRPARKADAGEGGGGSGGGGSGGGGSGGGGSGEVQLLESGGGLVQPGGSLRLSCAASGFTFSSYAMSWVRQAPGKGLEWVSGISGSGGFTYYADSVKGRFTISRDNSKNTLYLQMNSLRAEDTAVYYCAKPPRGYNYGPFDYWGQGTLVTVSSASTKGPSVFPLAPCSRSTSESTAALGCLVKDYFPEPVTVSWNSGALTSGVHTFPAVLQSSGLYSLSSVVTVPSSSLGTKTYTCNVDHKPSNTKVDKRVESKYGPPCPPCPAPEFLGGPSVFLFPPKPKDTLMISRTPEVTCVVVDVSQEDPEVQFNWYVDGVEVHNAKTKPREEQFNSTYRVVSVLTVLHQDWLNGKEYKCKVSNKGLPSSIEKTISKAKGQPREPQVYTLPPSQEEMTKNQVSLTCLVKGFYPSDIAVEWESNGQPENNYKTTPPVLDSDGSFFLYSRLTVDKSRWQEGNVFSCSVMHEALHNHYTQKSLSLSLGK

SEQ ID NO: 1387 - protein, 618 aa, synthetic construct
  REGION 1..618: note = LAG3 104-121 R110K-Sugemalimab-CD86 IgV Q25I/F33L/H90I
VGPGGLKSGRLPLQPRVQGGGGSGGGGSGGGGSGGGGSGEVQLLESGGGLVQPGGSLRLSCAASGFTFSSYAMSWVRQAPGKGLEWVSGISGSGGFTYYADSVKGRFTISRDNSKNTLYLQMNSLRAEDTAVYYCAKPPRGYNYGPFDYWGQGTLVTVSSASTKGPSVFPLAPCSRSTSESTAALGCLVKDYFPEPVTVSWNSGALTSGVHTFPAVLQSSGLYSLSSVVTVPSSSLGTKTYTCNVDHKPSNTKVDKRVESKYGPPCPPCPAPEFLGGPSVFLFPPKPKDTLMISRTPEVTCVVVDVSQEDPEVQFNWYVDGVEVHNAKTKPREEQFNSTYRVVSVLTVLHQDWLNGKEYKCKVSNKGLPSSIEKTISKAKGQPREPQVYTLPPSQEEMTKNQVSLTCLVKGFYPSDIAVEWESNGQPENNYKTTPPVLDSDGSFFLYSRLTVDKSRWQEGNVFSCSVMHEALHNHYTQKSLSLSLGAGGGGSGGGGSGGGGSGGGGSGAPLKIQAYFNETADLPCQFANSQNISLSELVVLWQDQENLVLNEVYLGKEKFDSVHSKYMGRTSFDSDSWTLRLHNLQIKDKGLYQCIIIHKKPTGMIRIHQMNSELSVL

SEQ ID NO: 1388 - protein, 618 aa, synthetic construct
  REGION 1..618: note = LAG3 104-121 R113K-Sugemalimab-CD86 IgV Q25I/F33L/H90I
VGPGGLRSGKLPLQPRVQGGGGSGGGGSGGGGSGGGGSGEVQLLESGGGLVQPGGSLRLSCAASGFTFSSYAMSWVRQAPGKGLEWVSGISGSGGFTYYADSVKGRFTISRDNSKNTLYLQMNSLRAEDTAVYYCAKPPRGYNYGPFDYWGQGTLVTVSSASTKGPSVFPLAPCSRSTSESTAALGCLVKDYFPEPVTVSWNSGALTSGVHTFPAVLQSSGLYSLSSVVTVPSSSLGTKTYTCNVDHKPSNTKVDKRVESKYGPPCPPCPAPEFLGGPSVFLFPPKPKDTLMISRTPEVTCVVVDVSQEDPEVQFNWYVDGVEVHNAKTKPREEQFNSTYRVVSVLTVLHQDWLNGKEYKCKVSNKGLPSSIEKTISKAKGQPREPQVYTLPPSQEEMTKNQVSLTCLVKGFYPSDIAVEWESNGQPENNYKTTPPVLDSDGSFFLYSRLTVDKSRWQEGNVFSCSVMHEALHNHYTQKSLSLSLGAGGGGSGGGGSGGGGSGGGGSGAPLKIQAYFNETADLPCQFANSQNISLSELVVLWQDQENLVLNEVYLGKEKFDSVHSKYMGRTSFDSDSWTLRLHNLQIKDKGLYQCIIIHKKPTGMIRIHQMNSELSVL

SEQ ID NO: 1389 - protein, 618 aa, synthetic construct
  REGION 1..618: note = LAG3 104-121 R110K/R113K-Sugemalimab-CD86 IgV Q25I/F33L/H90I
VGPGGLKSGKLPLQPRVQGGGGSGGGGSGGGGSGGGGSGEVQLLESGGGLVQPGGSLRLSCAASGFTFSSYAMSWVRQAPGKGLEWVSGISGSGGFTYYADSVKGRFTISRDNSKNTLYLQMNSLRAEDTAVYYCAKPPRGYNYGPFDYWGQGTLVTVSSASTKGPSVFPLAPCSRSTSESTAALGCLVKDYFPEPVTVSWNSGALTSGVHTFPAVLQSSGLYSLSSVVTVPSSSLGTKTYTCNVDHKPSNTKVDKRVESKYGPPCPPCPAPEFLGGPSVFLFPPKPKDTLMISRTPEVTCVVVDVSQEDPEVQFNWYVDGVEVHNAKTKPREEQFNSTYRVVSVLTVLHQDWLNGKEYKCKVSNKGLPSSIEKTISKAKGQPREPQVYTLPPSQEEMTKNQVSLTCLVKGFYPSDIAVEWESNGQPENNYKTTPPVLDSDGSFFLYSRLTVDKSRWQEGNVFSCSVMHEALHNHYTQKSLSLSLGAGGGGSGGGGSGGGGSGGGGSGAPLKIQAYFNETADLPCQFANSQNISLSELVVLWQDQENLVLNEVYLGKEKFDSVHSKYMGRTSFDSDSWTLRLHNLQIKDKGLYQCIIIHKKPTGMIRIHQMNSELSVL

SEQ ID NO: 1390 - protein, 618 aa, synthetic construct
  REGION 1..618: note = LAG3 104-121 R119K-Sugemalimab-CD86 IgV Q25I/F33L/H90I
VGPGGLRSGRLPLQPKVQGGGGSGGGGSGGGGSGGGGSGEVQLLESGGGLVQPGGSLRLSCAASGFTFSSYAMSWVRQAPGKGLEWVSGISGSGGFTYYADSVKGRFTISRDNSKNTLYLQMNSLRAEDTAVYYCAKPPRGYNYGPFDYWGQGTLVTVSSASTKGPSVFPLAPCSRSTSESTAALGCLVKDYFPEPVTVSWNSGALTSGVHTFPAVLQSSGLYSLSSVVTVPSSSLGTKTYTCNVDHKPSNTKVDKRVESKYGPPCPPCPAPEFLGGPSVFLFPPKPKDTLMISRTPEVTCVVVDVSQEDPEVQFNWYVDGVEVHNAKTKPREEQFNSTYRVVSVLTVLHQDWLNGKEYKCKVSNKGLPSSIEKTISKAKGQPREPQVYTLPPSQEEMTKNQVSLTCLVKGFYPSDIAVEWESNGQPENNYKTTPPVLDSDGSFFLYSRLTVDKSRWQEGNVFSCSVMHEALHNHYTQKSLSLSLGAGGGGSGGGGSGGGGSGGGGSGAPLKIQAYFNETADLPCQFANSQNISLSELVVLWQDQENLVLNEVYLGKEKFDSVHSKYMGRTSFDSDSWTLRLHNLQIKDKGLYQCIIIHKKPTGMIRIHQMNSELSVL

SEQ ID NO: 1391 - protein, 618 aa, synthetic construct
  REGION 1..618: note = LAG3 104-121 R110K/R119K-Sugemalimab-CD86 IgV Q25I/F33L/H90I
VGPGGLKSGRLPLQPKVQGGGGSGGGGSGGGGSGGGGSGEVQLLESGGGLVQPGGSLRLSCAASGFTFSSYAMSWVRQAPGKGLEWVSGISGSGGFTYYADSVKGRFTISRDNSKNTLYLQMNSLRAEDTAVYYCAKPPRGYNYGPFDYWGQGTLVTVSSASTKGPSVFPLAPCSRSTSESTAALGCLVKDYFPEPVTVSWNSGALTSGVHTFPAVLQSSGLYSLSSVVTVPSSSLGTKTYTCNVDHKPSNTKVDKRVESKYGPPCPPCPAPEFLGGPSVFLFPPKPKDTLMISRTPEVTCVVVDVSQEDPEVQFNWYVDGVEVHNAKTKPREEQFNSTYRVVSVLTVLHQDWLNGKEYKCKVSNKGLPSSIEKTISKAKGQPREPQVYTLPPSQEEMTKNQVSLTCLVKGFYPSDIAVEWESNGQPENNYKTTPPVLDSDGSFFLYSRLTVDKSRWQEGNVFSCSVMHEALHNHYTQKSLSLSLGAGGGGSGGGGSGGGGSGGGGSGAPLKIQAYFNETADLPCQFANSQNISLSELVVLWQDQENLVLNEVYLGKEKFDSVHSKYMGRTSFDSDSWTLRLHNLQIKDKGLYQCIIIHKKPTGMIRIHQMNSELSVL

SEQ ID NO: 1392 - protein, 618 aa, synthetic construct
  REGION 1..618: note = LAG3 104-121 R113K/R119K-Sugemalimab-CD86 IgV Q25I/F33L/H90I
VGPGGLRSGKLPLQPKVQGGGGSGGGGSGGGGSGGGGSGEVQLLESGGGLVQPGGSLRLSCAASGFTFSSYAMSWVRQAPGKGLEWVSGISGSGGFTYYADSVKGRFTISRDNSKNTLYLQMNSLRAEDTAVYYCAKPPRGYNYGPFDYWGQGTLVTVSSASTKGPSVFPLAPCSRSTSESTAALGCLVKDYFPEPVTVSWNSGALTSGVHTFPAVLQSSGLYSLSSVVTVPSSSLGTKTYTCNVDHKPSNTKVDKRVESKYGPPCPPCPAPEFLGGPSVFLFPPKPKDTLMISRTPEVTCVVVDVSQEDPEVQFNWYVDGVEVHNAKTKPREEQFNSTYRVVSVLTVLHQDWLNGKEYKCKVSNKGLPSSIEKTISKAKGQPREPQVYTLPPSQEEMTKNQVSLTCLVKGFYPSDIAVEWESNGQPENNYKTTPPVLDSDGSFFLYSRLTVDKSRWQEGNVFSCSVMHEALHNHYTQKSLSLSLGAGGGGSGGGGSGGGGSGGGGSGAPLKIQAYFNETADLPCQFANSQNISLSELVVLWQDQENLVLNEVYLGKEKFDSVHSKYMGRTSFDSDSWTLRLHNLQIKDKGLYQCIIIHKKPTGMIRIHQMNSELSVL

SEQ ID NO: 1393 - protein, 618 aa, synthetic construct
  REGION 1..618: note = LAG3 104-121 R110K/R113K/R119K-Sugemalimab-CD86 IgV Q25I/F33L/H90I
VGPGGLKSGKLPLQPKVQGGGGSGGGGSGGGGSGGGGSGEVQLLESGGGLVQPGGSLRLSCAASGFTFSSYAMSWVRQAPGKGLEWVSGISGSGGFTYYADSVKGRFTISRDNSKNTLYLQMNSLRAEDTAVYYCAKPPRGYNYGPFDYWGQGTLVTVSSASTKGPSVFPLAPCSRSTSESTAALGCLVKDYFPEPVTVSWNSGALTSGVHTFPAVLQSSGLYSLSSVVTVPSSSLGTKTYTCNVDHKPSNTKVDKRVESKYGPPCPPCPAPEFLGGPSVFLFPPKPKDTLMISRTPEVTCVVVDVSQEDPEVQFNWYVDGVEVHNAKTKPREEQFNSTYRVVSVLTVLHQDWLNGKEYKCKVSNKGLPSSIEKTISKAKGQPREPQVYTLPPSQEEMTKNQVSLTCLVKGFYPSDIAVEWESNGQPENNYKTTPPVLDSDGSFFLYSRLTVDKSRWQEGNVFSCSVMHEALHNHYTQKSLSLSLGAGGGGSGGGGSGGGGSGGGGSGAPLKIQAYFNETADLPCQFANSQNISLSELVVLWQDQENLVLNEVYLGKEKFDSVHSKYMGRTSFDSDSWTLRLHNLQIKDKGLYQCIIIHKKPTGMIRIHQMNSELSVL

SEQ ID NO: 1394 - protein, 625 aa, synthetic construct
  REGION 1..625: note = LAG3 122-146 R129K-Sugemalimab-CD86 IgV Q25I/F33L/H90I
LDERGRQKGDFSLWLRPARRADAGEGGGGSGGGGSGGGGSGGGGSGEVQLLESGGGLVQPGGSLRLSCAASGFTFSSYAMSWVRQAPGKGLEWVSGISGSGGFTYYADSVKGRFTISRDNSKNTLYLQMNSLRAEDTAVYYCAKPPRGYNYGPFDYWGQGTLVTVSSASTKGPSVFPLAPCSRSTSESTAALGCLVKDYFPEPVTVSWNSGALTSGVHTFPAVLQSSGLYSLSSVVTVPSSSLGTKTYTCNVDHKPSNTKVDKRVESKYGPPCPPCPAPEFLGGPSVFLFPPKPKDTLMISRTPEVTCVVVDVSQEDPEVQFNWYVDGVEVHNAKTKPREEQFNSTYRVVSVLTVLHQDWLNGKEYKCKVSNKGLPSSIEKTISKAKGQPREPQVYTLPPSQEEMTKNQVSLTCLVKGFYPSDIAVEWESNGQPENNYKTTPPVLDSDGSFFLYSRLTVDKSRWQEGNVFSCSVMHEALHNHYTQKSLSLSLGAGGGGSGGGGSGGGGSGGGGSGAPLKIQAYFNETADLPCQFANSQNISLSELVVLWQDQENLVLNEVYLGKEKFDSVHSKYMGRTSFDSDSWTLRLHNLQIKDKGLYQCIIIHKKPTGMIRIHQMNSELSVL

SEQ ID NO: 1395 - protein, 625 aa, synthetic construct
  REGION 1..625: note = LAG3 122-146 G130P-Sugemalimab-CD86 IgV Q25I/F33L/H90I
LDERGRQRPDFSLWLRPARRADAGEGGGGSGGGGSGGGGSGGGGSGEVQLLESGGGLVQPGGSLRLSCAASGFTFSSYAMSWVRQAPGKGLEWVSGISGSGGFTYYADSVKGRFTISRDNSKNTLYLQMNSLRAEDTAVYYCAKPPRGYNYGPFDYWGQGTLVTVSSASTKGPSVFPLAPCSRSTSESTAALGCLVKDYFPEPVTVSWNSGALTSGVHTFPAVLQSSGLYSLSSVVTVPSSSLGTKTYTCNVDHKPSNTKVDKRVESKYGPPCPPCPAPEFLGGPSVFLFPPKPKDTLMISRTPEVTCVVVDVSQEDPEVQFNWYVDGVEVHNAKTKPREEQFNSTYRVVSVLTVLHQDWLNGKEYKCKVSNKGLPSSIEKTISKAKGQPREPQVYTLPPSQEEMTKNQVSLTCLVKGFYPSDIAVEWESNGQPENNYKTTPPVLDSDGSFFLYSRLTVDKSRWQEGNVFSCSVMHEALHNHYTQKSLSLSLGAGGGGSGGGGSGGGGSGGGGSGAPLKIQAYFNETADLPCQFANSQNISLSELVVLWQDQENLVLNEVYLGKEKFDSVHSKYMGRTSFDSDSWTLRLHNLQIKDKGLYQCIIIHKKPTGMIRIHQMNSELSVL

SEQ ID NO: 1396 - protein, 625 aa, synthetic construct
  REGION 1..625: note = LAG3 122-146 G130A-Sugemalimab-CD86 IgV Q25I/F33L/H90I
LDERGRQRADFSLWLRPARRADAGEGGGGSGGGGSGGGGSGGGGSGEVQLLESGGGLVQPGGSLRLSCAASGFTFSSYAMSWVRQAPGKGLEWVSGISGSGGFTYYADSVKGRFTISRDNSKNTLYLQMNSLRAEDTAVYYCAKPPRGYNYGPFDYWGQGTLVTVSSASTKGPSVFPLAPCSRSTSESTAALGCLVKDYFPEPVTVSWNSGALTSGVHTFPAVLQSSGLYSLSSVVTVPSSSLGTKTYTCNVDHKPSNTKVDKRVESKYGPPCPPCPAPEFLGGPSVFLFPPKPKDTLMISRTPEVTCVVVDVSQEDPEVQFNWYVDGVEVHNAKTKPREEQFNSTYRVVSVLTVLHQDWLNGKEYKCKVSNKGLPSSIEKTISKAKGQPREPQVYTLPPSQEEMTKNQVSLTCLVKGFYPSDIAVEWESNGQPENNYKTTPPVLDSDGSFFLYSRLTVDKSRWQEGNVFSCSVMHEALHNHYTQKSLSLSLGAGGGGSGGGGSGGGGSGGGGSGAPLKIQAYFNETADLPCQFANSQNISLSELVVLWQDQENLVLNEVYLGKEKFDSVHSKYMGRTSFDSDSWTLRLHNLQIKDKGLYQCIIIHKKPTGMIRIHQMNSELSVL

SEQ ID NO: 1397 - protein, 625 aa, synthetic construct
  REGION 1..625: note = LAG3 122-146 G130T-Sugemalimab-CD86 IgV Q25I/F33L/H90I
LDERGRQRTDFSLWLRPARRADAGEGGGGSGGGGSGGGGSGGGGSGEVQLLESGGGLVQPGGSLRLSCAASGFTFSSYAMSWVRQAPGKGLEWVSGISGSGGFTYYADSVKGRFTISRDNSKNTLYLQMNSLRAEDTAVYYCAKPPRGYNYGPFDYWGQGTLVTVSSASTKGPSVFPLAPCSRSTSESTAALGCLVKDYFPEPVTVSWNSGALTSGVHTFPAVLQSSGLYSLSSVVTVPSSSLGTKTYTCNVDHKPSNTKVDKRVESKYGPPCPPCPAPEFLGGPSVFLFPPKPKDTLMISRTPEVTCVVVDVSQEDPEVQFNWYVDGVEVHNAKTKPREEQFNSTYRVVSVLTVLHQDWLNGKEYKCKVSNKGLPSSIEKTISKAKGQPREPQVYTLPPSQEEMTKNQVSLTCLVKGFYPSDIAVEWESNGQPENNYKTTPPVLDSDGSFFLYSRLTVDKSRWQEGNVFSCSVMHEALHNHYTQKSLSLSLGAGGGGSGGGGSGGGGSGGGGSGAPLKIQAYFNETADLPCQFANSQNISLSELVVLWQDQENLVLNEVYLGKEKFDSVHSKYMGRTSFDSDSWTLRLHNLQIKDKGLYQCIIIHKKPTGMIRIHQMNSELSVL

SEQ ID NO: 1398 - protein, 625 aa, synthetic construct
  REGION 1..625: note = LAG3 122-146 G130Y-Sugemalimab-CD86 IgV Q25I/F33L/H90I
LDERGRQRYDFSLWLRPARRADAGEGGGGSGGGGSGGGGSGGGGSGEVQLLESGGGLVQPGGSLRLSCAASGFTFSSYAMSWVRQAPGKGLEWVSGISGSGGFTYYADSVKGRFTISRDNSKNTLYLQMNSLRAEDTAVYYCAKPPRGYNYGPFDYWGQGTLVTVSSASTKGPSVFPLAPCSRSTSESTAALGCLVKDYFPEPVTVSWNSGALTSGVHTFPAVLQSSGLYSLSSVVTVPSSSLGTKTYTCNVDHKPSNTKVDKRVESKYGPPCPPCPAPEFLGGPSVFLFPPKPKDTLMISRTPEVTCVVVDVSQEDPEVQFNWYVDGVEVHNAKTKPREEQFNSTYRVVSVLTVLHQDWLNGKEYKCKVSNKGLPSSIEKTISKAKGQPREPQVYTLPPSQEEMTKNQVSLTCLVKGFYPSDIAVEWESNGQPENNYKTTPPVLDSDGSFFLYSRLTVDKSRWQEGNVFSCSVMHEALHNHYTQKSLSLSLGAGGGGSGGGGSGGGGSGGGGSGAPLKIQAYFNETADLPCQFANSQNISLSELVVLWQDQENLVLNEVYLGKEKFDSVHSKYMGRTSFDSDSWTLRLHNLQIKDKGLYQCIIIHKKPTGMIRIHQMNSELSVL

SEQ ID NO: 1399 - protein, 625 aa, synthetic construct
  REGION 1..625: note = LAG3 122-146 G130S-Sugemalimab-CD86 IgV Q25I/F33L/H90I
LDERGRQRSDFSLWLRPARRADAGEGGGGSGGGGSGGGGSGGGGSGEVQLLESGGGLVQPGGSLRLSCAASGFTFSSYAMSWVRQAPGKGLEWVSGISGSGGFTYYADSVKGRFTISRDNSKNTLYLQMNSLRAEDTAVYYCAKPPRGYNYGPFDYWGQGTLVTVSSASTKGPSVFPLAPCSRSTSESTAALGCLVKDYFPEPVTVSWNSGALTSGVHTFPAVLQSSGLYSLSSVVTVPSSSLGTKTYTCNVDHKPSNTKVDKRVESKYGPPCPPCPAPEFLGGPSVFLFPPKPKDTLMISRTPEVTCVVVDVSQEDPEVQFNWYVDGVEVHNAKTKPREEQFNSTYRVVSVLTVLHQDWLNGKEYKCKVSNKGLPSSIEKTISKAKGQPREPQVYTLPPSQEEMTKNQVSLTCLVKGFYPSDIAVEWESNGQPENNYKTTPPVLDSDGSFFLYSRLTVDKSRWQEGNVFSCSVMHEALHNHYTQKSLSLSLGAGGGGSGGGGSGGGGSGGGGSGAPLKIQAYFNETADLPCQFANSQNISLSELVVLWQDQENLVLNEVYLGKEKFDSVHSKYMGRTSFDSDSWTLRLHNLQIKDKGLYQCIIIHKKPTGMIRIHQMNSELSVL

SEQ ID NO: 1400 - protein, 625 aa, synthetic construct
  REGION 1..625: note = LAG3 122-146 R141K-Sugemalimab-CD86 IgV Q25I/F33L/H90I
LDERGRQRGDFSLWLRPARKADAGEGGGGSGGGGSGGGGSGGGGSGEVQLLESGGGLVQPGGSLRLSCAASGFTFSSYAMSWVRQAPGKGLEWVSGISGSGGFTYYADSVKGRFTISRDNSKNTLYLQMNSLRAEDTAVYYCAKPPRGYNYGPFDYWGQGTLVTVSSASTKGPSVFPLAPCSRSTSESTAALGCLVKDYFPEPVTVSWNSGALTSGVHTFPAVLQSSGLYSLSSVVTVPSSSLGTKTYTCNVDHKPSNTKVDKRVESKYGPPCPPCPAPEFLGGPSVFLFPPKPKDTLMISRTPEVTCVVVDVSQEDPEVQFNWYVDGVEVHNAKTKPREEQFNSTYRVVSVLTVLHQDWLNGKEYKCKVSNKGLPSSIEKTISKAKGQPREPQVYTLPPSQEEMTKNQVSLTCLVKGFYPSDIAVEWESNGQPENNYKTTPPVLDSDGSFFLYSRLTVDKSRWQEGNVFSCSVMHEALHNHYTQKSLSLSLGAGGGGSGGGGSGGGGSGGGGSGAPLKIQAYFNETADLPCQFANSQNISLSELVVLWQDQENLVLNEVYLGKEKFDSVHSKYMGRTSFDSDSWTLRLHNLQIKDKGLYQCIIIHKKPTGMIRIHQMNSELSVL

SEQ ID NO: 1401 - protein, 625 aa, synthetic construct
  REGION 1..625: note = LAG3 122-146 R129K/G130P-Sugemalimab-CD86 IgV Q25I/F33L/H90I
LDERGRQKPDFSLWLRPARRADAGEGGGGSGGGGSGGGGSGGGGSGEVQLLESGGGLVQPGGSLRLSCAASGFTFSSYAMSWVRQAPGKGLEWVSGISGSGGFTYYADSVKGRFTISRDNSKNTLYLQMNSLRAEDTAVYYCAKPPRGYNYGPFDYWGQGTLVTVSSASTKGPSVFPLAPCSRSTSESTAALGCLVKDYFPEPVTVSWNSGALTSGVHTFPAVLQSSGLYSLSSVVTVPSSSLGTKTYTCNVDHKPSNTKVDKRVESKYGPPCPPCPAPEFLGGPSVFLFPPKPKDTLMISRTPEVTCVVVDVSQEDPEVQFNWYVDGVEVHNAKTKPREEQFNSTYRVVSVLTVLHQDWLNGKEYKCKVSNKGLPSSIEKTISKAKGQPREPQVYTLPPSQEEMTKNQVSLTCLVKGFYPSDIAVEWESNGQPENNYKTTPPVLDSDGSFFLYSRLTVDKSRWQEGNVFSCSVMHEALHNHYTQKSLSLSLGAGGGGSGGGGSGGGGSGGGGSGAPLKIQAYFNETADLPCQFANSQNISLSELVVLWQDQENLVLNEVYLGKEKFDSVHSKYMGRTSFDSDSWTLRLHNLQIKDKGLYQCIIIHKKPTGMIRIHQMNSELSVL

SEQ ID NO: 1402 - protein, 625 aa, synthetic construct
  REGION 1..625: note = LAG3 122-146 R129K/R141K-Sugemalimab-CD86 IgV Q25I/F33L/H90I
LDERGRQKGDFSLWLRPARKADAGEGGGGSGGGGSGGGGSGGGGSGEVQLLESGGGLVQPGGSLRLSCAASGFTFSSYAMSWVRQAPGKGLEWVSGISGSGGFTYYADSVKGRFTISRDNSKNTLYLQMNSLRAEDTAVYYCAKPPRGYNYGPFDYWGQGTLVTVSSASTKGPSVFPLAPCSRSTSESTAALGCLVKDYFPEPVTVSWNSGALTSGVHTFPAVLQSSGLYSLSSVVTVPSSSLGTKTYTCNVDHKPSNTKVDKRVESKYGPPCPPCPAPEFLGGPSVFLFPPKPKDTLMISRTPEVTCVVVDVSQEDPEVQFNWYVDGVEVHNAKTKPREEQFNSTYRVVSVLTVLHQDWLNGKEYKCKVSNKGLPSSIEKTISKAKGQPREPQVYTLPPSQEEMTKNQVSLTCLVKGFYPSDIAVEWESNGQPENNYKTTPPVLDSDGSFFLYSRLTVDKSRWQEGNVFSCSVMHEALHNHYTQKSLSLSLGAGGGGSGGGGSGGGGSGGGGSGAPLKIQAYFNETADLPCQFANSQNISLSELVVLWQDQENLVLNEVYLGKEKFDSVHSKYMGRTSFDSDSWTLRLHNLQIKDKGLYQCIIIHKKPTGMIRIHQMNSELSVL

SEQ ID NO: 1403 - protein, 625 aa, synthetic construct
  REGION 1..625: note = LAG3 122-146 G130P/R141K-Sugemalimab-CD86 IgV Q25I/F33L/H90I
LDERGRQRPDFSLWLRPARKADAGEGGGGSGGGGSGGGGSGGGGSGEVQLLESGGGLVQPGGSLRLSCAASGFTFSSYAMSWVRQAPGKGLEWVSGISGSGGFTYYADSVKGRFTISRDNSKNTLYLQMNSLRAEDTAVYYCAKPPRGYNYGPFDYWGQGTLVTVSSASTKGPSVFPLAPCSRSTSESTAALGCLVKDYFPEPVTVSWNSGALTSGVHTFPAVLQSSGLYSLSSVVTVPSSSLGTKTYTCNVDHKPSNTKVDKRVESKYGPPCPPCPAPEFLGGPSVFLFPPKPKDTLMISRTPEVTCVVVDVSQEDPEVQFNWYVDGVEVHNAKTKPREEQFNSTYRVVSVLTVLHQDWLNGKEYKCKVSNKGLPSSIEKTISKAKGQPREPQVYTLPPSQEEMTKNQVSLTCLVKGFYPSDIAVEWESNGQPENNYKTTPPVLDSDGSFFLYSRLTVDKSRWQEGNVFSCSVMHEALHNHYTQKSLSLSLGAGGGGSGGGGSGGGGSGGGGSGAPLKIQAYFNETADLPCQFANSQNISLSELVVLWQDQENLVLNEVYLGKEKFDSVHSKYMGRTSFDSDSWTLRLHNLQIKDKGLYQCIIIHKKPTGMIRIHQMNSELSVL

SEQ ID NO: 1404 - protein, 625 aa, synthetic construct
  REGION 1..625: note = LAG3 122-146 G130A/R141K-Sugemalimab-CD86 IgV Q25I/F33L/H90I
LDERGRQRADFSLWLRPARKADAGEGGGGSGGGGSGGGGSGGGGSGEVQLLESGGGLVQPGGSLRLSCAASGFTFSSYAMSWVRQAPGKGLEWVSGISGSGGFTYYADSVKGRFTISRDNSKNTLYLQMNSLRAEDTAVYYCAKPPRGYNYGPFDYWGQGTLVTVSSASTKGPSVFPLAPCSRSTSESTAALGCLVKDYFPEPVTVSWNSGALTSGVHTFPAVLQSSGLYSLSSVVTVPSSSLGTKTYTCNVDHKPSNTKVDKRVESKYGPPCPPCPAPEFLGGPSVFLFPPKPKDTLMISRTPEVTCVVVDVSQEDPEVQFNWYVDGVEVHNAKTKPREEQFNSTYRVVSVLTVLHQDWLNGKEYKCKVSNKGLPSSIEKTISKAKGQPREPQVYTLPPSQEEMTKNQVSLTCLVKGFYPSDIAVEWESNGQPENNYKTTPPVLDSDGSFFLYSRLTVDKSRWQEGNVFSCSVMHEALHNHYTQKSLSLSLGAGGGGSGGGGSGGGGSGGGGSGAPLKIQAYFNETADLPCQFANSQNISLSELVVLWQDQENLVLNEVYLGKEKFDSVHSKYMGRTSFDSDSWTLRLHNLQIKDKGLYQCIIIHKKPTGMIRIHQMNSELSVL

SEQ ID NO: 1405 - protein, 625 aa, synthetic construct
  REGION 1..625: note = LAG3 122-146 G130T/R141K-Sugemalimab-CD86 IgV Q25I/F33L/H90I
LDERGRQRTDFSLWLRPARKADAGEGGGGSGGGGSGGGGSGGGGSGEVQLLESGGGLVQPGGSLRLSCAASGFTFSSYAMSWVRQAPGKGLEWVSGISGSGGFTYYADSVKGRFTISRDNSKNTLYLQMNSLRAEDTAVYYCAKPPRGYNYGPFDYWGQGTLVTVSSASTKGPSVFPLAPCSRSTSESTAALGCLVKDYFPEPVTVSWNSGALTSGVHTFPAVLQSSGLYSLSSVVTVPSSSLGTKTYTCNVDHKPSNTKVDKRVESKYGPPCPPCPAPEFLGGPSVFLFPPKPKDTLMISRTPEVTCVVVDVSQEDPEVQFNWYVDGVEVHNAKTKPREEQFNSTYRVVSVLTVLHQDWLNGKEYKCKVSNKGLPSSIEKTISKAKGQPREPQVYTLPPSQEEMTKNQVSLTCLVKGFYPSDIAVEWESNGQPENNYKTTPPVLDSDGSFFLYSRLTVDKSRWQEGNVFSCSVMHEALHNHYTQKSLSLSLGAGGGGSGGGGSGGGGSGGGGSGAPLKIQAYFNETADLPCQFANSQNISLSELVVLWQDQENLVLNEVYLGKEKFDSVHSKYMGRTSFDSDSWTLRLHNLQIKDKGLYQCIIIHKKPTGMIRIHQMNSELSVL

SEQ ID NO: 1406 - protein, 625 aa, synthetic construct
  REGION 1..625: note = LAG3 122-146 G130Y/R141K-Sugemalimab-CD86 IgV Q25I/F33L/H90I
LDERGRQRYDFSLWLRPARKADAGEGGGGSGGGGSGGGGSGGGGSGEVQLLESGGGLVQPGGSLRLSCAASGFTFSSYAMSWVRQAPGKGLEWVSGISGSGGFTYYADSVKGRFTISRDNSKNTLYLQMNSLRAEDTAVYYCAKPPRGYNYGPFDYWGQGTLVTVSSASTKGPSVFPLAPCSRSTSESTAALGCLVKDYFPEPVTVSWNSGALTSGVHTFPAVLQSSGLYSLSSVVTVPSSSLGTKTYTCNVDHKPSNTKVDKRVESKYGPPCPPCPAPEFLGGPSVFLFPPKPKDTLMISRTPEVTCVVVDVSQEDPEVQFNWYVDGVEVHNAKTKPREEQFNSTYRVVSVLTVLHQDWLNGKEYKCKVSNKGLPSSIEKTISKAKGQPREPQVYTLPPSQEEMTKNQVSLTCLVKGFYPSDIAVEWESNGQPENNYKTTPPVLDSDGSFFLYSRLTVDKSRWQEGNVFSCSVMHEALHNHYTQKSLSLSLGAGGGGSGGGGSGGGGSGGGGSGAPLKIQAYFNETADLPCQFANSQNISLSELVVLWQDQENLVLNEVYLGKEKFDSVHSKYMGRTSFDSDSWTLRLHNLQIKDKGLYQCIIIHKKPTGMIRIHQMNSELSVL

SEQ ID NO: 1407 - protein, 625 aa, synthetic construct
  REGION 1..625: note = LAG3 122-146 G130S/R141K-Sugemalimab-CD86 IgV Q25I/F33L/H90I
LDERGRQRSDFSLWLRPARKADAGEGGGGSGGGGSGGGGSGGGGSGEVQLLESGGGLVQPGGSLRLSCAASGFTFSSYAMSWVRQAPGKGLEWVSGISGSGGFTYYADSVKGRFTISRDNSKNTLYLQMNSLRAEDTAVYYCAKPPRGYNYGPFDYWGQGTLVTVSSASTKGPSVFPLAPCSRSTSESTAALGCLVKDYFPEPVTVSWNSGALTSGVHTFPAVLQSSGLYSLSSVVTVPSSSLGTKTYTCNVDHKPSNTKVDKRVESKYGPPCPPCPAPEFLGGPSVFLFPPKPKDTLMISRTPEVTCVVVDVSQEDPEVQFNWYVDGVEVHNAKTKPREEQFNSTYRVVSVLTVLHQDWLNGKEYKCKVSNKGLPSSIEKTISKAKGQPREPQVYTLPPSQEEMTKNQVSLTCLVKGFYPSDIAVEWESNGQPENNYKTTPPVLDSDGSFFLYSRLTVDKSRWQEGNVFSCSVMHEALHNHYTQKSLSLSLGAGGGGSGGGGSGGGGSGGGGSGAPLKIQAYFNETADLPCQFANSQNISLSELVVLWQDQENLVLNEVYLGKEKFDSVHSKYMGRTSFDSDSWTLRLHNLQIKDKGLYQCIIIHKKPTGMIRIHQMNSELSVL

SEQ ID NO: 1408 - protein, 643 aa, synthetic construct
  REGION 1..643: note = LAG3 104-146 R110K-Sugemalimab-CD86 IgV Q25I/F33L/H90I
VGPGGLKSGRLPLQPRVQLDERGRQRGDFSLWLRPARRADAGEGGGGSGGGGSGGGGSGGGGSGEVQLLESGGGLVQPGGSLRLSCAASGFTFSSYAMSWVRQAPGKGLEWVSGISGSGGFTYYADSVKGRFTISRDNSKNTLYLQMNSLRAEDTAVYYCAKPPRGYNYGPFDYWGQGTLVTVSSASTKGPSVFPLAPCSRSTSESTAALGCLVKDYFPEPVTVSWNSGALTSGVHTFPAVLQSSGLYSLSSVVTVPSSSLGTKTYTCNVDHKPSNTKVDKRVESKYGPPCPPCPAPEFLGGPSVFLFPPKPKDTLMISRTPEVTCVVVDVSQEDPEVQFNWYVDGVEVHNAKTKPREEQFNSTYRVVSVLTVLHQDWLNGKEYKCKVSNKGLPSSIEKTISKAKGQPREPQVYTLPPSQEEMTKNQVSLTCLVKGFYPSDIAVEWESNGQPENNYKTTPPVLDSDGSFFLYSRLTVDKSRWQEGNVFSCSVMHEALHNHYTQKSLSLSLGAGGGGSGGGGSGGGGSGGGGSGAPLKIQAYFNETADLPCQFANSQNISLSELVVLWQDQENLVLNEVYLGKEKFDSVHSKYMGRTSFDSDSWTLRLHNLQIKDKGLYQCIIIHKKPTGMIRIHQMNSELSVL

SEQ ID NO: 1409 - protein, 643 aa, synthetic construct
  REGION 1..643: note = LAG3 104-146 R113K-Sugemalimab-CD86 IgV Q25I/F33L/H90I
VGPGGLRSGKLPLQPRVQLDERGRQRGDFSLWLRPARRADAGEGGGGSGGGGSGGGGSGGGGSGEVQLLESGGGLVQPGGSLRLSCAASGFTFSSYAMSWVRQAPGKGLEWVSGISGSGGFTYYADSVKGRFTISRDNSKNTLYLQMNSLRAEDTAVYYCAKPPRGYNYGPFDYWGQGTLVTVSSASTKGPSVFPLAPCSRSTSESTAALGCLVKDYFPEPVTVSWNSGALTSGVHTFPAVLQSSGLYSLSSVVTVPSSSLGTKTYTCNVDHKPSNTKVDKRVESKYGPPCPPCPAPEFLGGPSVFLFPPKPKDTLMISRTPEVTCVVVDVSQEDPEVQFNWYVDGVEVHNAKTKPREEQFNSTYRVVSVLTVLHQDWLNGKEYKCKVSNKGLPSSIEKTISKAKGQPREPQVYTLPPSQEEMTKNQVSLTCLVKGFYPSDIAVEWESNGQPENNYKTTPPVLDSDGSFFLYSRLTVDKSRWQEGNVFSCSVMHEALHNHYTQKSLSLSLGAGGGGSGGGGSGGGGSGGGGSGAPLKIQAYFNETADLPCQFANSQNISLSELVVLWQDQENLVLNEVYLGKEKFDSVHSKYMGRTSFDSDSWTLRLHNLQIKDKGLYQCIIIHKKPTGMIRIHQMNSELSVL

SEQ ID NO: 1410 - protein, 643 aa, synthetic construct
  REGION 1..643: note = LAG3 104-146 R129K-Sugemalimab-CD86 IgV Q25I/F33L/H90I
VGPGGLRSGRLPLQPRVQLDERGRQKGDFSLWLRPARRADAGEGGGGSGGGGSGGGGSGGGGSGEVQLLESGGGLVQPGGSLRLSCAASGFTFSSYAMSWVRQAPGKGLEWVSGISGSGGFTYYADSVKGRFTISRDNSKNTLYLQMNSLRAEDTAVYYCAKPPRGYNYGPFDYWGQGTLVTVSSASTKGPSVFPLAPCSRSTSESTAALGCLVKDYFPEPVTVSWNSGALTSGVHTFPAVLQSSGLYSLSSVVTVPSSSLGTKTYTCNVDHKPSNTKVDKRVESKYGPPCPPCPAPEFLGGPSVFLFPPKPKDTLMISRTPEVTCVVVDVSQEDPEVQFNWYVDGVEVHNAKTKPREEQFNSTYRVVSVLTVLHQDWLNGKEYKCKVSNKGLPSSIEKTISKAKGQPREPQVYTLPPSQEEMTKNQVSLTCLVKGFYPSDIAVEWESNGQPENNYKTTPPVLDSDGSFFLYSRLTVDKSRWQEGNVFSCSVMHEALHNHYTQKSLSLSLGAGGGGSGGGGSGGGGSGGGGSGAPLKIQAYFNETADLPCQFANSQNISLSELVVLWQDQENLVLNEVYLGKEKFDSVHSKYMGRTSFDSDSWTLRLHNLQIKDKGLYQCIIIHKKPTGMIRIHQMNSELSVL

SEQ ID NO: 1411 - protein, 643 aa, synthetic construct
  REGION 1..643: note = LAG3 104-146 G130P-Sugemalimab-CD86 IgV Q25I/F33L/H90I
VGPGGLRSGRLPLQPRVQLDERGRQRPDFSLWLRPARRADAGEGGGGSGGGGSGGGGSGGGGSGEVQLLESGGGLVQPGGSLRLSCAASGFTFSSYAMSWVRQAPGKGLEWVSGISGSGGFTYYADSVKGRFTISRDNSKNTLYLQMNSLRAEDTAVYYCAKPPRGYNYGPFDYWGQGTLVTVSSASTKGPSVFPLAPCSRSTSESTAALGCLVKDYFPEPVTVSWNSGALTSGVHTFPAVLQSSGLYSLSSVVTVPSSSLGTKTYTCNVDHKPSNTKVDKRVESKYGPPCPPCPAPEFLGGPSVFLFPPKPKDTLMISRTPEVTCVVVDVSQEDPEVQFNWYVDGVEVHNAKTKPREEQFNSTYRVVSVLTVLHQDWLNGKEYKCKVSNKGLPSSIEKTISKAKGQPREPQVYTLPPSQEEMTKNQVSLTCLVKGFYPSDIAVEWESNGQPENNYKTTPPVLDSDGSFFLYSRLTVDKSRWQEGNVFSCSVMHEALHNHYTQKSLSLSLGAGGGGSGGGGSGGGGSGGGGSGAPLKIQAYFNETADLPCQFANSQNISLSELVVLWQDQENLVLNEVYLGKEKFDSVHSKYMGRTSFDSDSWTLRLHNLQIKDKGLYQCIIIHKKPTGMIRIHQMNSELSVL

SEQ ID NO: 1412 - protein, 643 aa, synthetic construct
  REGION 1..643: note = LAG3 104-146 G130A-Sugemalimab-CD86 IgV Q25I/F33L/H90I
VGPGGLRSGRLPLQPRVQLDERGRQRADFSLWLRPARRADAGEGGGGSGGGGSGGGGSGGGGSGEVQLLESGGGLVQPGGSLRLSCAASGFTFSSYAMSWVRQAPGKGLEWVSGISGSGGFTYYADSVKGRFTISRDNSKNTLYLQMNSLRAEDTAVYYCAKPPRGYNYGPFDYWGQGTLVTVSSASTKGPSVFPLAPCSRSTSESTAALGCLVKDYFPEPVTVSWNSGALTSGVHTFPAVLQSSGLYSLSSVVTVPSSSLGTKTYTCNVDHKPSNTKVDKRVESKYGPPCPPCPAPEFLGGPSVFLFPPKPKDTLMISRTPEVTCVVVDVSQEDPEVQFNWYVDGVEVHNAKTKPREEQFNSTYRVVSVLTVLHQDWLNGKEYKCKVSNKGLPSSIEKTISKAKGQPREPQVYTLPPSQEEMTKNQVSLTCLVKGFYPSDIAVEWESNGQPENNYKTTPPVLDSDGSFFLYSRLTVDKSRWQEGNVFSCSVMHEALHNHYTQKSLSLSLGAGGGGSGGGGSGGGGSGGGGSGAPLKIQAYFNETADLPCQFANSQNISLSELVVLWQDQENLVLNEVYLGKEKFDSVHSKYMGRTSFDSDSWTLRLHNLQIKDKGLYQCIIIHKKPTGMIRIHQMNSELSVL

SEQ ID NO: 1413 - protein, 643 aa, synthetic construct
  REGION 1..643: note = LAG3 104-146 G130T-Sugemalimab-CD86 IgV Q25I/F33L/H90I
VGPGGLRSGRLPLQPRVQLDERGRQRTDFSLWLRPARRADAGEGGGGSGGGGSGGGGSGGGGSGEVQLLESGGGLVQPGGSLRLSCAASGFTFSSYAMSWVRQAPGKGLEWVSGISGSGGFTYYADSVKGRFTISRDNSKNTLYLQMNSLRAEDTAVYYCAKPPRGYNYGPFDYWGQGTLVTVSSASTKGPSVFPLAPCSRSTSESTAALGCLVKDYFPEPVTVSWNSGALTSGVHTFPAVLQSSGLYSLSSVVTVPSSSLGTKTYTCNVDHKPSNTKVDKRVESKYGPPCPPCPAPEFLGGPSVFLFPPKPKDTLMISRTPEVTCVVVDVSQEDPEVQFNWYVDGVEVHNAKTKPREEQFNSTYRVVSVLTVLHQDWLNGKEYKCKVSNKGLPSSIEKTISKAKGQPREPQVYTLPPSQEEMTKNQVSLTCLVKGFYPSDIAVEWESNGQPENNYKTTPPVLDSDGSFFLYSRLTVDKSRWQEGNVFSCSVMHEALHNHYTQKSLSLSLGAGGGGSGGGGSGGGGSGGGGSGAPLKIQAYFNETADLPCQFANSQNISLSELVVLWQDQENLVLNEVYLGKEKFDSVHSKYMGRTSFDSDSWTLRLHNLQIKDKGLYQCIIIHKKPTGMIRIHQMNSELSVL

SEQ ID NO: 1414 - protein, 643 aa, synthetic construct
  REGION 1..643: note = LAG3 104-146 G130Y-Sugemalimab-CD86 IgV Q25I/F33L/H90I
VGPGGLRSGRLPLQPRVQLDERGRQRYDFSLWLRPARRADAGEGGGGSGGGGSGGGGSGGGGSGEVQLLESGGGLVQPGGSLRLSCAASGFTFSSYAMSWVRQAPGKGLEWVSGISGSGGFTYYADSVKGRFTISRDNSKNTLYLQMNSLRAEDTAVYYCAKPPRGYNYGPFDYWGQGTLVTVSSASTKGPSVFPLAPCSRSTSESTAALGCLVKDYFPEPVTVSWNSGALTSGVHTFPAVLQSSGLYSLSSVVTVPSSSLGTKTYTCNVDHKPSNTKVDKRVESKYGPPCPPCPAPEFLGGPSVFLFPPKPKDTLMISRTPEVTCVVVDVSQEDPEVQFNWYVDGVEVHNAKTKPREEQFNSTYRVVSVLTVLHQDWLNGKEYKCKVSNKGLPSSIEKTISKAKGQPREPQVYTLPPSQEEMTKNQVSLTCLVKGFYPSDIAVEWESNGQPENNYKTTPPVLDSDGSFFLYSRLTVDKSRWQEGNVFSCSVMHEALHNHYTQKSLSLSLGAGGGGSGGGGSGGGGSGGGGSGAPLKIQAYFNETADLPCQFANSQNISLSELVVLWQDQENLVLNEVYLGKEKFDSVHSKYMGRTSFDSDSWTLRLHNLQIKDKGLYQCIIIHKKPTGMIRIHQMNSELSVL

SEQ ID NO: 1415 - protein, 643 aa, synthetic construct
  REGION 1..643: note = LAG3 104-146 G130S-Sugemalimab-CD86 IgV Q25I/F33L/H90I
VGPGGLRSGRLPLQPRVQLDERGRQRSDFSLWLRPARRADAGEGGGGSGGGGSGGGGSGGGGSGEVQLLESGGGLVQPGGSLRLSCAASGFTFSSYAMSWVRQAPGKGLEWVSGISGSGGFTYYADSVKGRFTISRDNSKNTLYLQMNSLRAEDTAVYYCAKPPRGYNYGPFDYWGQGTLVTVSSASTKGPSVFPLAPCSRSTSESTAALGCLVKDYFPEPVTVSWNSGALTSGVHTFPAVLQSSGLYSLSSVVTVPSSSLGTKTYTCNVDHKPSNTKVDKRVESKYGPPCPPCPAPEFLGGPSVFLFPPKPKDTLMISRTPEVTCVVVDVSQEDPEVQFNWYVDGVEVHNAKTKPREEQFNSTYRVVSVLTVLHQDWLNGKEYKCKVSNKGLPSSIEKTISKAKGQPREPQVYTLPPSQEEMTKNQVSLTCLVKGFYPSDIAVEWESNGQPENNYKTTPPVLDSDGSFFLYSRLTVDKSRWQEGNVFSCSVMHEALHNHYTQKSLSLSLGAGGGGSGGGGSGGGGSGGGGSGAPLKIQAYFNETADLPCQFANSQNISLSELVVLWQDQENLVLNEVYLGKEKFDSVHSKYMGRTSFDSDSWTLRLHNLQIKDKGLYQCIIIHKKPTGMIRIHQMNSELSVL

SEQ ID NO: 1416 - protein, 643 aa, synthetic construct
  REGION 1..643: note = LAG3 104-146 R141K-Sugemalimab-CD86 IgV Q25I/F33L/H90I
VGPGGLRSGRLPLQPRVQLDERGRQRGDFSLWLRPARKADAGEGGGGSGGGGSGGGGSGGGGSGEVQLLESGGGLVQPGGSLRLSCAASGFTFSSYAMSWVRQAPGKGLEWVSGISGSGGFTYYADSVKGRFTISRDNSKNTLYLQMNSLRAEDTAVYYCAKPPRGYNYGPFDYWGQGTLVTVSSASTKGPSVFPLAPCSRSTSESTAALGCLVKDYFPEPVTVSWNSGALTSGVHTFPAVLQSSGLYSLSSVVTVPSSSLGTKTYTCNVDHKPSNTKVDKRVESKYGPPCPPCPAPEFLGGPSVFLFPPKPKDTLMISRTPEVTCVVVDVSQEDPEVQFNWYVDGVEVHNAKTKPREEQFNSTYRVVSVLTVLHQDWLNGKEYKCKVSNKGLPSSIEKTISKAKGQPREPQVYTLPPSQEEMTKNQVSLTCLVKGFYPSDIAVEWESNGQPENNYKTTPPVLDSDGSFFLYSRLTVDKSRWQEGNVFSCSVMHEALHNHYTQKSLSLSLGAGGGGSGGGGSGGGGSGGGGSGAPLKIQAYFNETADLPCQFANSQNISLSELVVLWQDQENLVLNEVYLGKEKFDSVHSKYMGRTSFDSDSWTLRLHNLQIKDKGLYQCIIIHKKPTGMIRIHQMNSELSVL

SEQ ID NO: 1417 - protein, 643 aa, synthetic construct
  REGION 1..643: note = LAG3 104-146 R110K/G130P-Sugemalimab-CD86 IgV Q25I/F33L/H90I
VGPGGLKSGRLPLQPRVQLDERGRQRPDFSLWLRPARRADAGEGGGGSGGGGSGGGGSGGGGSGEVQLLESGGGLVQPGGSLRLSCAASGFTFSSYAMSWVRQAPGKGLEWVSGISGSGGFTYYADSVKGRFTISRDNSKNTLYLQMNSLRAEDTAVYYCAKPPRGYNYGPFDYWGQGTLVTVSSASTKGPSVFPLAPCSRSTSESTAALGCLVKDYFPEPVTVSWNSGALTSGVHTFPAVLQSSGLYSLSSVVTVPSSSLGTKTYTCNVDHKPSNTKVDKRVESKYGPPCPPCPAPEFLGGPSVFLFPPKPKDTLMISRTPEVTCVVVDVSQEDPEVQFNWYVDGVEVHNAKTKPREEQFNSTYRVVSVLTVLHQDWLNGKEYKCKVSNKGLPSSIEKTISKAKGQPREPQVYTLPPSQEEMTKNQVSLTCLVKGFYPSDIAVEWESNGQPENNYKTTPPVLDSDGSFFLYSRLTVDKSRWQEGNVFSCSVMHEALHNHYTQKSLSLSLGAGGGGSGGGGSGGGGSGGGGSGAPLKIQAYFNETADLPCQFANSQNISLSELVVLWQDQENLVLNEVYLGKEKFDSVHSKYMGRTSFDSDSWTLRLHNLQIKDKGLYQCIIIHKKPTGMIRIHQMNSELSVL

SEQ ID NO: 1418 - protein, 643 aa, synthetic construct
  REGION 1..643: note = LAG3 104-146 G130P/R141K-Sugemalimab-CD86 IgV Q25I/F33L/H90I
VGPGGLRSGRLPLQPRVQLDERGRQRPDFSLWLRPARKADAGEGGGGSGGGGSGGGGSGGGGSGEVQLLESGGGLVQPGGSLRLSCAASGFTFSSYAMSWVRQAPGKGLEWVSGISGSGGFTYYADSVKGRFTISRDNSKNTLYLQMNSLRAEDTAVYYCAKPPRGYNYGPFDYWGQGTLVTVSSASTKGPSVFPLAPCSRSTSESTAALGCLVKDYFPEPVTVSWNSGALTSGVHTFPAVLQSSGLYSLSSVVTVPSSSLGTKTYTCNVDHKPSNTKVDKRVESKYGPPCPPCPAPEFLGGPSVFLFPPKPKDTLMISRTPEVTCVVVDVSQEDPEVQFNWYVDGVEVHNAKTKPREEQFNSTYRVVSVLTVLHQDWLNGKEYKCKVSNKGLPSSIEKTISKAKGQPREPQVYTLPPSQEEMTKNQVSLTCLVKGFYPSDIAVEWESNGQPENNYKTTPPVLDSDGSFFLYSRLTVDKSRWQEGNVFSCSVMHEALHNHYTQKSLSLSLGAGGGGSGGGGSGGGGSGGGGSGAPLKIQAYFNETADLPCQFANSQNISLSELVVLWQDQENLVLNEVYLGKEKFDSVHSKYMGRTSFDSDSWTLRLHNLQIKDKGLYQCIIIHKKPTGMIRIHQMNSELSVL

SEQ ID NO: 1419 - protein, 643 aa, synthetic construct
  REGION 1..643: note = LAG3 104-146 R110K/R141K-Sugemalimab-CD86 IgV Q25I/F33L/H90I
VGPGGLKSGRLPLQPRVQLDERGRQRGDFSLWLRPARKADAGEGGGGSGGGGSGGGGSGGGGSGEVQLLESGGGLVQPGGSLRLSCAASGFTFSSYAMSWVRQAPGKGLEWVSGISGSGGFTYYADSVKGRFTISRDNSKNTLYLQMNSLRAEDTAVYYCAKPPRGYNYGPFDYWGQGTLVTVSSASTKGPSVFPLAPCSRSTSESTAALGCLVKDYFPEPVTVSWNSGALTSGVHTFPAVLQSSGLYSLSSVVTVPSSSLGTKTYTCNVDHKPSNTKVDKRVESKYGPPCPPCPAPEFLGGPSVFLFPPKPKDTLMISRTPEVTCVVVDVSQEDPEVQFNWYVDGVEVHNAKTKPREEQFNSTYRVVSVLTVLHQDWLNGKEYKCKVSNKGLPSSIEKTISKAKGQPREPQVYTLPPSQEEMTKNQVSLTCLVKGFYPSDIAVEWESNGQPENNYKTTPPVLDSDGSFFLYSRLTVDKSRWQEGNVFSCSVMHEALHNHYTQKSLSLSLGAGGGGSGGGGSGGGGSGGGGSGAPLKIQAYFNETADLPCQFANSQNISLSELVVLWQDQENLVLNEVYLGKEKFDSVHSKYMGRTSFDSDSWTLRLHNLQIKDKGLYQCIIIHKKPTGMIRIHQMNSELSVL

SEQ ID NO: 1420 - protein, 643 aa, synthetic construct
  REGION 1..643: note = LAG3 104-146 R110K/G130P/R141K-Sugemalimab-CD86 IgV Q25I/F33L/H90I
VGPGGLKSGRLPLQPRVQLDERGRQRPDFSLWLRPARKADAGEGGGGSGGGGSGGGGSGGGGSGEVQLLESGGGLVQPGGSLRLSCAASGFTFSSYAMSWVRQAPGKGLEWVSGISGSGGFTYYADSVKGRFTISRDNSKNTLYLQMNSLRAEDTAVYYCAKPPRGYNYGPFDYWGQGTLVTVSSASTKGPSVFPLAPCSRSTSESTAALGCLVKDYFPEPVTVSWNSGALTSGVHTFPAVLQSSGLYSLSSVVTVPSSSLGTKTYTCNVDHKPSNTKVDKRVESKYGPPCPPCPAPEFLGGPSVFLFPPKPKDTLMISRTPEVTCVVVDVSQEDPEVQFNWYVDGVEVHNAKTKPREEQFNSTYRVVSVLTVLHQDWLNGKEYKCKVSNKGLPSSIEKTISKAKGQPREPQVYTLPPSQEEMTKNQVSLTCLVKGFYPSDIAVEWESNGQPENNYKTTPPVLDSDGSFFLYSRLTVDKSRWQEGNVFSCSVMHEALHNHYTQKSLSLSLGAGGGGSGGGGSGGGGSGGGGSGAPLKIQAYFNETADLPCQFANSQNISLSELVVLWQDQENLVLNEVYLGKEKFDSVHSKYMGRTSFDSDSWTLRLHNLQIKDKGLYQCIIIHKKPTGMIRIHQMNSELSVL

SEQ ID NO: 1421 - protein, 621 aa, synthetic construct
  REGION 1..621: note = LAG3 101-121-Sugemalimab-CD86 IgV Q25I/F33L/H90I
VLSVGPGGLRSGRLPLQPRVQGGGGSGGGGSGGGGSGGGGSGEVQLLESGGGLVQPGGSLRLSCAASGFTFSSYAMSWVRQAPGKGLEWVSGISGSGGFTYYADSVKGRFTISRDNSKNTLYLQMNSLRAEDTAVYYCAKPPRGYNYGPFDYWGQGTLVTVSSASTKGPSVFPLAPCSRSTSESTAALGCLVKDYFPEPVTVSWNSGALTSGVHTFPAVLQSSGLYSLSSVVTVPSSSLGTKTYTCNVDHKPSNTKVDKRVESKYGPPCPPCPAPEFLGGPSVFLFPPKPKDTLMISRTPEVTCVVVDVSQEDPEVQFNWYVDGVEVHNAKTKPREEQFNSTYRVVSVLTVLHQDWLNGKEYKCKVSNKGLPSSIEKTISKAKGQPREPQVYTLPPSQEEMTKNQVSLTCLVKGFYPSDIAVEWESNGQPENNYKTTPPVLDSDGSFFLYSRLTVDKSRWQEGNVFSCSVMHEALHNHYTQKSLSLSLGAGGGGSGGGGSGGGGSGGGGSGAPLKIQAYFNETADLPCQFANSQNISLSELVVLWQDQENLVLNEVYLGKEKFDSVHSKYMGRTSFDSDSWTLRLHNLQIKDKGLYQCIIIHKKPTGMIRIHQMNSELSVL

SEQ ID NO: 1422 - DNA, 1863 bp, synthetic construct
  misc_feature 1..1863: note = LAG3 101-121-Sugemalimab-CD86 IgV Q25I/F33L/H90I polynucleotide
  source 1..1863: mol_type = other DNA
gtcctttcagtgggcccaggcggccttaggagcggcagactccccctgcaaccaagagtacagggggggggggggagcggtgggggaggaagcggagggggtggctccggcggggggggatctggagaagtgcagttgctcgagtccggcggcggtcttgtgcagcctggaggctcacttagactcagttgtgccgcatctgggttcactttctccagttacgctatgtcatgggtgagacaggctccaggaaaaggtctggaatgggtaagcgggatcagcgggtctggaggcttcacatactatgccgactctgtcaaaggccgcttcaccatctccagggataattctaagaacactctctacctccagatgaactcattgagagctgaggacactgccgtttattactgcgcaaagcctccgagggggtacaattatggccctttcgactattgggggcaggggacgctggtgacggtgagctccgcatcaaccaagggaccctccgtttttccactggcaccctgcagccgatctacttccgagagcacagccgcactgggatgtctcgtgaaggattacttccccgaaccagtcacggtgtcctggaattctggagcactgacatctggcgtccacacattccctgcggtgctgcaaagcagcggtctgtactctctctcatccgtcgtcacagtgccctctagcagcctcgggacaaagacctatacttgcaatgtcgaccacaagccgagcaataccaaggttgacaagagagtcgagtctaaatacgggccaccttgccccccctgtcccgctcccgagtttctcggagggcctagtgtgttcctcttcccgcccaaacctaaggatacactgatgattagcaggactcctgaagtcacatgcgtagtcgtcgacgtgtcccaagaggaccctgaagtacagtttaattggtacgtcgatggtgtggaagtgcacaacgctaagaccaagcctagggaggagcagttcaactcaacatatagagtggtgtcagtccttacagtgctgcaccaggattggctgaacgggaaagagtacaagtgtaaggtttccaataagggacttcccagttccatcgaaaagaccatatccaaggctaaaggtcagcctagagagccacaggtgtacacactgcccccttctcaggaagaaatgactaagaaccaggtgtctctcacgtgtctggtcaagggcttttacccctctgatatcgcagtcgagtgggagtccaacggtcaacctgaaaataactacaagactacgccccccgtgttggatagcgacggctcattctttttgtattccaggctgaccgttgacaagagcaggtggcaggagggcaacgtgtttagttgttcagtgatgcacgaagccttgcacaaccattatacgcaaaaaagtttgagtctgtctctgggtgcggggggaggcggaagtgggggtggggggagtggaggaggaggctcaggcggtggcggaagcggtgccccactcaagatacaggcttactttaacgaaacggctgatctcccatgtcagtttgctaactctcagaatatctcacttagcgagctggtggtgctttggcaagatcaggagaacctggtgttgaatgaggtttacctggggaaagagaaattcgatagcgtgcatagtaaatacatggggcgcacaagtttcgacagcgatagctggactctccgcctccataatcttcagattaaggacaaggggctgtatcagtgtatcataattcataagaagccaactggtatgatcaggatacaccaaatgaatagcgagctgtcagtgctc

SEQ ID NO: 1423 - DNA, 642 bp, synthetic construct
  misc_feature 1..642: note = sugemalimab polynucleotide
  source 1..642: mol_type = other DNA
tcttacgtattgacacaaccaccttctgtctcagttgcccctggccaaaccgccaggattacatgtggcgggaacaatattggttccaagtctgtgcactggtaccagcagaaacctggtcaggcacccgtgctggtcgtgtacgatgacagtgatcggccctcaggaatacctgagcgctttagtggctcaaacagcggtaacacagccacccttacaatttccagagtcgaagctggagacgaggccgattactactgccaggtgtgggattcttctagcgaccatgtagtctttgggggaggaactaagcttacagttctcgggcagcccaaagctgccccatcagttaccctgttcccaccaagttctgaggaactgcaagccaacaaggcaacactggtgtgcctgatttctgatttttaccccggcgccgtgacggtagcgtggaaagctgactcaagccctgtaaaagccggagtcgagactaccacacctagcaagcagagcaataataagtatgccgccagcagctacctgagcttgacgccagagcagtggaagagccacagatcctactcctgccaggtaacccatgaggggagcaccgtcgaaaaaacggtggcccctacggaatgttct

SEQ ID NO: 1424 - DNA, 1854 bp, synthetic construct
  misc_feature 1..1854: note = LAG3 104-121 R110K-Sugemalimab-CD86 IgV Q25I/F33L/H90I polynucleotide
  source 1..1854: mol_type = other DNA
gtgggccctggcggactcaaatcaggacgactcccccttcagcccagagtgcaggggggcggcggatccgggggcggaggttctggaggtggaggatctggcgggggcggttctggtgaggttcagttgctggaatccggcggtggactggtccaaccaggaggatctctgcggttgtcctgtgcagcctccgggtttacctttagttcttatgcaatgagctgggtgcgacaggcgcctggtaaaggcctggaatgggtgagcggaatcagcggatccggaggattcacttactacgctgacagtgtgaagggcagatttacaataagccgggacaactccaaaaatacactgtatctgcagatgaactcactgcgggcggaggatactgctgtctactattgtgctaaacccccccgcgggtataattacggtccatttgactactggggccagggtacactggtaactgtcagtagcgcttcaacaaaagggcccagcgtttttcctcttgccccgtgctcccgaagcaccagtgagtcaaccgctgctttggggtgtctcgttaaagactattttcctgagccggtaacagtttcttggaatagcggggctctgactagcggagttcatacttttccggcagtgcttcagtctagtggcctgtacagcctgtccagcgttgtgacagtccccagttcctccttgggcaccaaaacttacacttgcaatgtggatcataaacctagcaacaccaaggtggataaacgcgtagagagtaagtacggtccaccttgccccccatgccccgcccccgagtttcttggcggtccatcagtctttctgttccctccgaagcccaaggatacgctgatgatctcccggacccccgaggtcacatgtgtcgtagtggatgtctcccaggaagatcccgaggttcagtttaactggtacgtagatggggtagaggtgcacaatgcgaagaccaagccaagagaagagcagttcaattctacttaccgcgtggtgtcagtgctcactgtgctccaccaggactggcttaacgggaaggaatacaagtgcaaagtttccaataagggactgccaagctccatagagaagactatcagcaaggcaaaaggacagcctagagagcctcaggtctacacactgccaccatcccaggaggaaatgaccaagaaccaggtcagcctgacttgtctcgtgaagggcttttaccccagcgacatcgcagtcgagtgggaatcaaacggccaaccggagaacaactacaagacaaccccaccagtgctggactccgatggtagcttcttcctgtacagtagactcactgtggataaaagccggtggcaagaaggcaacgtgtttagctgtagcgtgatgcacgaggccctgcacaaccattatacccagaagtcactgtccctgagcctgggggctggaggcggtgggtctggggggggcgggagcggaggtgggggatcagggggggggggaagcggagcccctctgaagatccaggcttatttcaatgagacagcagatttgccatgtcagttcgctaatagtcagaacattagcctgagcgagctggtggtgctgtggcaagatcaggagaacctggtgctgaacgaagtgtatctggggaaagagaaatttgattccgttcattctaagtacatgggtcgaactagctttgactctgatagttggactctgcggctgcacaacctgcagattaaggataaggggctttatcagtgtatcattatccataagaagcccacaggaatgatcaggatccaccagatgaatagtgaactgtccgtcctg

SEQ ID NO: 1425 - DNA, 1854 bp, synthetic construct
  misc_feature 1..1854: note = LAG3 104-121 R110K/R113K/R119K-Sugemalimab-CD86 IgV Q25I/F33L/H90I polynucleotide
  source 1..1854: mol_type = other DNA
gtcggaccaggaggcctgaaaagtggtaagctccccctgcaaccaaaagtccaaggaggcggagggtcagggggaggaggctctggcggtggaggctcaggaggcggcggatccggcgaagtgcagctgttggagtcaggcggtggcctggtgcaacctggtggaagcctccggctctcctgcgccgcatcaggatttacttttagcagctacgccatgtcctgggtacgccaggctcctgggaagggccttgagtgggtgtctggcatatccggatcaggcggtttcacctactacgctgattctgtgaagggaaggttcaccatcagtagggacaactcaaaaaacactctgtacttgcagatgaactctctccgggcagaggacacggcggtatactactgtgcaaaacccccaagaggttacaactatggacctttcgattattgggggcaggggacactggtgaccgtgagtagtgcgtccaccaaaggccctagtgtctttcccctggctccgtgcagtaggagcacaagcgagtccaccgctgctctgggttgccttgtcaaagactacttccccgagcctgtcacagtttcctggaatagtggtgccttgacatcaggagttcacacatttccggcagtgctgcaatcttccgggctgtatagcctgagcagtgtcgtgaccgttccaagctcctcactgggtactaaaacctatacatgtaacgtggatcacaaacctagcaacacaaaggtggacaagagggttgagtccaaatatggcccaccctgtccaccatgcccagcccctgaattcctcggaggacccagcgtttttctgttccctcccaagcccaaagatacgctgatgatatctaggacccccgaggtgacgtgcgtcgtggtggatgtttctcaagaggacccggaggtgcagtttaactggtatgtggatggagttgaggtgcacaacgctaagaccaagccacgggaagagcagtttaacagtacatacagagttgttagtgtgctcacagtcctgcatcaggactggctcaacgggaaagagtacaagtgtaaagtaagcaacaagggtctgccaagtagtatcgagaagaccattagtaaagcaaaaggtcagccccgggaacctcaggtgtacacccttccaccctcccaggaagaaatgacaaaaaaccaggtctccctcacctgcctggtcaaagggttctacccctcagatatcgctgtcgagtgggagtccaacgggcaacccgaaaacaactacaaaactactcctcccgtacttgactctgacggtagctttttcctctattccagactgaccgtcgataaaagtaggtggcaggagggcaacgttttcagctgctccgtgatgcatgaagccctgcacaaccattacacccagaaatcactgagtcttagccttggagccggcgggggcggaagcgggggtggagggtctgggggaggaggatcaggcggaggaggcagtggcgcacctcttaagattcaagcctacttcaacgaaacagccgacttgccttgtcagttcgctaacagtcagaacatatccctgtccgagctcgtggtgctgtggcaggaccaggagaatctggtgctgaacgaggtttatctgggtaaggagaagttcgacagcgtgcattctaagtacatggggcggacgagcttcgatagcgacagctggactctgagactgcacaatctccagattaaggacaagggattgtatcagtgtataatcattcataagaagccgacaggaatgatccgcattcatcagatgaactctgagttgagcgttctt

SEQ ID NO: 1426 - protein, 625 aa, synthetic construct
  REGION 1..625: note = LAG3 122-146-Sugemalimab-CD86 IgV Q25I/F33L/H90I
LDERGRQRGDFSLWLRPARRADAGEEVQLLESGGGLVQPGGSLRLSCAASGFTFSSYAMSWVRQAPGKGLEWVSGISGSGGFTYYADSVKGRFTISRDNSKNTLYLQMNSLRAEDTAVYYCAKPPRGYNYGPFDYWGQGTLVTVSSASTKGPSVFPLAPCSRSTSESTAALGCLVKDYFPEPVTVSWNSGALTSGVHTFPAVLQSSGLYSLSSVVTVPSSSLGTKTYTCNVDHKPSNTKVDKRVESKYGPPCPPCPAPEFLGGPSVFLFPPKPKDTLMISRTPEVTCVVVDVSQEDPEVQFNWYVDGVEVHNAKTKPREEQFNSTYRVVSVLTVLHQDWLNGKEYKCKVSNKGLPSSIEKTISKAKGQPREPQVYTLPPSQEEMTKNQVSLTCLVKGFYPSDIAVEWESNGQPENNYKTTPPVLDSDGSFFLYSRLTVDKSRWQEGNVFSCSVMHEALHNHYTQKSLSLSLGAGGGGSGGGGSGGGGSGGGGSGGGGGSGGGGSGGGGSGGGGSGAPLKIQAYFNETADLPCQFANSQNISLSELVVLWQDQENLVLNEVYLGKEKFDSVHSKYMGRTSFDSDSWTLRLHNLQIKDKGLYQCIIIHKKPTGMIRIHQMNSELSVL

SEQ ID NO: 1427 - DNA, 1875 bp, synthetic construct
  misc_feature 1..1875: note = LAG3 122-146-Sugemalimab-CD86 IgV Q25I/F33L/H90I polynucleotide
  source 1..1875: mol_type = other DNA
ctcgacgaaaggggaagacaaagaggagacttctcattgtggcttagacctgcccgcagagcagacgccggtgagggaggtggcggctccgggggtggaggctctggaggtggagggtctggaggaggcgggtctggcgaagtgcagttgctcgaatctggaggaggtcttgttcaacccggcggatccctgaggctctcatgcgccgcctccggctttaccttcagtagttacgccatgagctgggttaggcaggctcccggcaaagggctggaatgggtgagcggtatttcaggctccggtggattcacctattacgctgacagcgtgaaggggcggttcacgatttctcgcgataactcaaagaatacgctgtatctccaaatgaactctttgcgggccgaggatactgccgtttactattgtgctaagccacctagagggtacaattacggccctttcgactactggggacagggcacattggtcactgtgagttccgccagcacaaaagggccttccgtctttccactcgctccatgcagcagaagcacctccgagagcacagcagcacttggatgcttggtcaaggattattttcctgagccagttactgtgtcttggaattccggcgctctgacatctggggtgcatacctttccggctgtgctgcagtcaagtggactgtattctctgtcttctgttgtgaccgtgcccagctccagtcttggaactaagacgtacacctgcaacgtcgatcacaagcccagcaacactaaggtggacaagcgggtggaatctaagtatggtccaccctgccccccatgtccggctcccgagtttctggggggaccttccgtgttcctgtttccccctaaacccaaggacaccctgatgatctccagaactcctgaggtcacttgtgtagtggtcgacgtaagtcaggaggatcctgaggtgcagtttaattggtatgttgacggggtggaagttcataatgcaaagacaaagccgcgagaagagcagttcaacagcacataccgagtcgtaagcgtgctgaccgtccttcaccaggattggctgaatgggaaggagtataaatgtaaggtgtccaataagggcctgcccagttcaattgagaagacaatcagcaaggccaaaggacagccgcgcgagcctcaagtgtataccctgccgccttcacaagaggagatgaccaaaaaccaggtgagtctcacctgcttggtgaaaggcttctatccctctgatatcgctgtggagtgggagtcaaatgggcagcccgaaaataactacaagaccaccccccctgttctcgactcagacggtagctttttcctctatagcagactcaccgtagacaaatcacggtggcaagagggaaatgttttctcctgctcagttatgcacgaggccctgcacaatcactacactcagaaatccctttcactgtccctgggtgccggtggaggaggcagtggagggggcggctctggagggggcggttctggggggggaggctccggcgccccactcaagatccaagcctactttaatgagaccgccgatctgccctgccagtttgccaacagccagaatatatctctgagtgagctggtggtcctgtggcaggaccaggaaaatctcgttctgaatgaggtgtacctgggaaaggagaaattcgacagcgtccattcaaagtatatgggacggacctcattcgactccgactcctggactctgaggctccacaatctccaaatcaaggacaaggggctgtaccagtgcatcataattcacaagaaaccaactgggatgatccgcatccaccaaatgaattccgagctgtccgtattg

SEQ ID NO: 1428 - DNA, 1875 bp, synthetic construct
  misc_feature 1..1875: note = LAG3 122-146 G130P-Sugemalimab-CD86 IgV Q25I/F33L/H90I polynucleotide
  source 1..1875: mol_type = other DNA
ctggacgaaagaggaagacaaagaccagattttagtctctggctccgccccgcccggcgggcagatgccggcgagggaggaggagggtctggcggaggtggcagtgggggaggcggatctggtggtggtggctcaggcgaagtgcaactgctggaaagcggcggcggtctcgttcagcctggtggcagcctgaggcttagctgcgccgcaagtgggttcactttctcatcctacgctatgtcttgggtcaggcaggcccctgggaaggggctcgaatgggtcagtggcatttctggttccgggggcttcacatactatgcagactccgtgaaaggccggttcacaatctctcgcgacaatagcaaaaataccctgtatttgcagatgaattctctgcgcgccgaggacaccgcagtctattactgcgccaaacctcctcgcgggtacaattatgggccatttgattactggggccaggggaccctggttacagtctcttcagcaagcaccaagggcccatcagtttttccactggccccgtgtagcaggtccacttctgaaagcacagccgcgctcggctgtctcgtcaaggattattttccggagcctgtgacggtgtcctggaactccggtgccttgacaagcggggtgcacactttccctgctgtgctgcagtctagcggcttgtattccctctcttctgttgtaactgttccatcctccagccttggcaccaagacctacacctgtaacgtggatcacaagcctagcaatacaaaagtggacaagcgggtagaatctaagtacgggcctccgtgccccccatgccccgcccccgagtttctgggtggcccctcagtgttccttttccctcctaagcccaaagacactctgatgatatcacggacgcctgaagtgacttgcgtggtggtcgacgtcagccaggaggaccccgaggtccagttcaactggtacgttgatggggtggaagttcacaacgctaagaccaagccgagggaggagcagtttaacagcacctaccgggtagtgtccgtgctgaccgtcttgcaccaggattggctgaatggaaaggagtataagtgtaaggtgtccaataaggggctgccctcttccatcgagaaaaccatcagcaaggctaagggccagcctagggagccccaggtatataccctgccaccaagtcaggaggagatgaccaaaaaccaggtctcactgacctgcttggtgaagggcttctatccatccgacattgccgtagagtgggagtctaacggacaacccgaaaacaattataagaccacacctcccgtgctggattctgacgggtccttcttcctgtattccaggttgacagtagacaaaagtagatggcaggaagggaacgtcttttcctgctcagtgatgcatgaggcactccataatcattatacgcaaaagtcactttcactgtcactgggagctggggggggcggaagcggcgggggaggatctgggggcggaggctcaggtggcggaggcagcggagcccctctcaaaatccaagcctatttcaacgaaacggccgacctcccctgccagttcgccaattctcagaatatctctctcagcgagctcgtggtcctctggcaagaccaggagaatcttgtgctcaacgaggtgtatctgggaaaggagaagttcgacagtgtccatagcaagtatatgggtcgaactagttttgactccgactcctggacattgcggttgcacaacctgcagattaaggacaagggactgtatcagtgtatcatcattcacaagaagcctaccggcatgattaggatacaccagatgaacagcgaactcagcgtcctg

SEQ ID NO: 1429 - DNA, 1875 bp, synthetic construct
  misc_feature 1..1875: note = LAG3 122-146 G130P/R141K-Sugemalimab-CD86 IgV Q25I/F33L/H90I polynucleotide
  source 1..1875: mol_type = other DNA
ctcgacgaacgcggccgccaaagacccgacttctctctctggcttagaccggctaggaaagcagacgccggcgagggtggtggcggatctggcggtggaggatccggtggcggagggtcaggggggggaggcagcggtgaggttcagctcctcgaaagcggtggagggttggtgcaacctggcggctcacttcgactgtcatgcgcagcttctggctttaccttctcctcttatgcaatgagctgggttcgacaggctcctgggaaaggcctcgagtgggtttccgggatcagcggttcaggcgggtttacttactatgcagatagcgtgaaaggcaggttcacaatttctagagataactccaagaacacactctatctgcagatgaacagcctgcgcgcggaggacaccgccgtgtactactgtgccaaacctccccggggctacaattacgggcctttcgattactggggtcagggtactctggtgaccgtctccagtgccagcaccaagggaccctctgtgtttccgttggctccatgctctcgcagcacaagtgagtctacggcggccctcggttgcctggtgaaggactattttcctgagcctgtcaccgtttcctggaattcaggcgccctgacatccggggtccatacatttcctgctgttcttcagtctagcggactctatagcctcagttccgtggtaacagtgcccagtagctccttgggaaccaagacctatacttgcaacgtcgaccacaagcctagtaacaccaaggtggacaaaagggtcgagtccaagtacggtcccccgtgtccaccctgtccggctcccgaatttttgggagggccatccgtctttctttttcctcctaaaccgaaggacacattgatgatcagcagaacaccagaggttacttgtgtcgtcgttgacgtgagtcaggaagaccctgaagtccagttcaactggtatgtggatggggtggaggtccacaacgccaagacaaagcctcgggaggagcagttcaattcaacttacagggtggtctctgttctgacagtgctgcaccaggactggctcaatggcaaggagtacaaatgcaaggtttctaacaaaggcttgccaagctctatcgaaaagaccatatctaaggctaaaggtcagcccagggagccccaggtatacaccctgcctccttcacaggaagaaatgactaagaatcaggtttcacttacctgccttgtgaaaggtttctatccctctgacattgccgttgagtgggaaagcaacggccagcctgagaacaattataaaacgactcctcccgtgctcgattccgacggctccttctttttgtattcccgccttacagtggacaagagccgatggcaggaaggaaacgtgttctcctgttccgtgatgcacgaggctctgcacaaccattacacgcaaaaaagcctctctctgtctctcggcgcgggcggcgggggatccggaggtggcggcagtgggggtggaggctctgggggaggaggctcaggtgctcctctgaagatccaggcatactttaacgagacggcggatctgccctgtcagtttgctaactcccagaatattagcctgtctgagctggtggtgctctggcaagatcaggagaacctcgtcctgaacgaggtctacctggggaaggagaagtttgacagcgtccattccaaatacatggggcgcacctcctttgatagtgactcatggacattgaggctgcacaatttgcagattaaggataaagggctgtaccagtgcatcattattcataaaaagccgacaggcatgattcggattcaccagatgaattccgagctgagcgtgttg

SEQ ID NO: 1430 - DNA, 1875 bp, synthetic construct
  misc_feature 1..1875: note = LAG3 122-146 R129K/R141K-Sugemalimab-CD86 IgV Q25I/F33L/H90I polynucleotide
  source 1..1875: mol_type = other DNA
cttgacgaacgaggaagacagaagggtgactttagcctgtggctccgcccagctaggaaagctgatgccggagagggtggtggcggaagcggcgggggtggaagtggcgggggtggatcaggcggaggcggttcaggagaggttcagcttctggagagtggcgggggcctcgtgcaacctggtggcagcctccgactcagttgtgctgcaagcggctttacgttcagtagttacgctatgagttgggtgcgccaagcccctggaaagggcttggagtgggtgtcaggcattagcggaagtgggggatttacatactacgccgatagtgtcaagggacggtttaccattagtcgcgacaacagcaaaaataccttgtatttgcagatgaatagcctccgcgctgaagacaccgccgtctattactgtgcaaagccgcctaggggctacaattatggcccattcgattactgggggcagggcacccttgtcacagtatccagcgcttccactaagggaccaagtgtgtttcctctggctccttgctcaagaagtaccagcgagtcaaccgccgccttgggttgcctcgttaaagactattttcctgagcccgttacagtgagctggaactctggagcattgacaagcggcgtgcatacctttccagctgtcctccagtcctctggcctgtactcactgtcttccgtggtaaccgtaccatcttcaagcctgggcaccaaaacatacacatgcaatgttgaccataaaccaagcaatacgaaagtggataagagggtcgaaagcaagtatgggcctccatgtccaccctgtccggcaccagaattcttgggcgggccgtcagtatttctgtttcctccgaaaccaaaggataccctgatgatcagcaggactcccgaggtcacttgtgtggtcgtggatgtcagccaggaagatccggaggtacagtttaactggtatgtcgacggagtggaagtccataacgccaaaactaagccccgcgaagaacagttcaatagcacctacagagtagtaagcgtcctcacagtgctgcatcaggactggctgaatggaaaggagtataaatgcaaggtctcaaacaaagggctcccatcctccatcgagaagacgatttctaaggctaagggacaaccaagggaacctcaggtgtacacactcccccccagccaggaagagatgaccaagaaccaggtgtcactcacctgcttggtgaaagggttttacccaagcgatatcgctgtggaatgggagtccaatggccagccggaaaacaactacaaaacaactccaccggttttggactccgacggctcattcttcctgtactccagactgacagttgataagtctaggtggcaggagggcaacgtcttctcctgtagtgtcatgcacgaagccctgcataatcattacacccagaagtcactttccctgtccttgggagccggcggcggaggctccggcggcggcggctctggcggagggggttcaggcggtggaggatcaggagcccccctgaagatacaagcgtacttcaatgagactgcagacctgccctgtcaattcgctaattcacagaacatctccctgagtgagctggtagtcctttggcaggaccaggaaaacctggtgctcaatgaagtttacctgggcaaggagaaattcgactccgttcactctaagtacatggggcggacatccttcgacagtgatagttggacactgcggctgcacaacctgcagataaaagacaagggcctgtaccagtgcattattatccacaaaaagccaaccgggatgatccggatacatcagatgaattctgagttgtctgtgttg

SEQ ID NO: 1431 - DNA, 1875 bp, synthetic construct
  misc_feature 1..1875: note = LAG3 122-146 G130A/R141K-Sugemalimab-CD86 IgV Q25I/F33L/H90I polynucleotide
  source 1..1875: mol_type = other DNA
ctcgacgagaggggtagacaacgcgcagatttctccctttggctccgacctgcacgaaaagccgatgctggtgaaggcggaggtggatctgggggggggggatccggcggaggaggtagtggtggaggaggctccggagaagttcagctgctggaatctggaggaggtcttgtacagcccggtggtagcctcagacttagttgcgcagcctccggcttcacattctcttcctatgccatgagctgggtgagacaggctcctggaaagggcctggaatgggtgagtggtatctccggatccggaggctttacctactacgctgactcagtcaagggcagattcacaatctcaagagataattctaagaacacgctgtaccttcagatgaacagtctgagagctgaggatactgctgtctactattgcgcaaagcctccaagggggtacaattatgggccctttgattattggggccaaggaactcttgttacagtctcctccgcctccactaagggcccctctgttttcccactggccccttgtagccgctctacctccgaaagcactgctgcccttggctgcctggtaaaagactatttcccagaaccagtgactgtgtcatggaattccggcgccctgacaagtggagtccacacattccccgcagtattgcagtcatccggactctatagcttgagttcagtggtcacagtcccatccagctcattgggtacaaagacatatacgtgcaacgtagaccacaaacccagcaacacaaaagtagacaaaagggtggagtccaagtatgggcctccgtgtcctccgtgcccagccccagagtttcttggaggaccgtccgtcttcctcttccccccaaaaccaaaggacacgctgatgattagcagaaccccagaagtaacctgtgttgtggttgacgtgagccaagaggatccagaagtgcagttcaactggtacgtagacggcgtggaggtacacaatgccaaaactaagccccgcgaagagcagttcaacagcacctatagggttgtatccgtgctcacagtgctgcatcaggactggcttaacggtaaggagtataaatgtaaggtgagcaacaaaggtttgccaagctctatcgaaaagacgatctctaaggcgaaaggccagccccgggaacctcaggtctacacactgccaccctctcaggaggaaatgaccaaaaaccaggtgtcactgacgtgcttggtgaaaggattctacccctctgacatcgccgtggaatgggagtcaaacggccagcccgagaataactacaagaccaccccacccgtgcttgacagtgatggtagcttcttcttgtacagccgacttactgttgacaaaagcagatggcaggaggggaacgtgttcagttgtagcgtgatgcacgaagcgctgcataaccactacactcagaaaagcctgagcttgtccctcggcgctggtggggggggatccggagggggggggagtggagggggcgggtccggcggaggcggaagtggagcgccccttaagatccaagcatacttcaatgaaaccgctgacctcccctgccagttcgctaattcccagaatatcagtctttctgagctggtggtgctttggcaagaccaggagaatctcgtgctgaacgaggtttacctgggaaaggaaaagttcgactccgttcattccaagtatatgggccggacctcatttgacagcgatagctggacccttcgcttgcataacctgcaaattaaggacaaggggctgtatcagtgtataattatccacaaaaagcccactggaatgatccgaattcatcagatgaatagtgaactctcagtgctc

SEQ ID NO: 1432 - DNA, 1875 bp, synthetic construct
  misc_feature 1..1875: note = LAG3 122-146 G130A-Sugemalimab-CD86 IgV Q25I/F33L/H90I polynucleotide
  source 1..1875: mol_type = other DNA
cttgacgagagaggcagacaaagagcagacttttcactgtggctgagaccagccagaagagccgacgctggggaggggggcggcgggtctggaggagggggctcaggcgggggggggtctggaggcggcggttcaggggaagtacagttgctggaatcaggcggaggactcgttcagccgggcggaagtctgaggctctcctgtgctgcctccggtttcacattttccagttacgcaatgagttgggttcggcaagcccccggaaaaggactcgagtgggtgtccggtatcagcggatctggaggatttacctattacgccgacagcgttaaaggaaggttcactatcagccgggataactccaagaacacactgtacctccagatgaatagcttgcgggccgaggacacagctgtctactactgcgctaaacccccccgagggtacaattatggccccttcgactactggggacagggaaccctcgtgacagtttcaagtgcctctacaaagggcccgagcgtgtttccactggctccttgcagcagatccacatctgaatccacggctgcacttgggtgtcttgtcaaagactattttcccgaacccgtaaccgtcagctggaatagtggggccctgacaagcggagtgcatacctttcccgctgtgctgcagagctccggtctgtacagtctcagcagtgtggttacagttccaagtagttccctgggcaccaagacctatacctgtaatgtggatcacaagccttccaatacgaaagtggataagagagttgagtcaaagtacgggccgccatgtcctccttgtcctgctccggaatttctgggcggcccatcagttttcctttttccccctaaacccaaagatactctgatgatttcccgcacccctgaggtgacatgtgtcgttgttgatgtttcacaggaggatccagaggtccagttcaactggtatgtcgacggcgtcgaagttcacaatgctaagaccaagccacgggaggaacagtttaacagcacataccgcgtcgtctccgtcctcactgttctgcaccaagactggctcaatggcaaggagtacaagtgtaaggtctcaaacaaaggactcccgagtagtatcgagaagacgattagcaaggctaagggccaacccagggagccccaggtgtacactctcccccccagccaagaggaaatgaccaagaaccaagtctccttgacctgcctcgtgaaaggcttctacccctctgacatagctgttgagtgggagtcaaacggccaacccgaaaataactacaaaacaactcctcctgtgctggattctgacggcagcttcttcctctactccaggctgacagtcgacaaatctaggtggcaggaggggaacgtgttttcctgctccgttatgcatgaggctcttcacaaccattacacgcagaaaagcttgtccctgtcactgggcgccggaggcggtggttcaggtggcggtggcagcgggggaggagggtccgggggtggtgggtccggagctcccctcaaaattcaagcctatttcaacgagaccgccgacctgccttgtcaattcgccaattcccagaacatcagcctgtcagaacttgtggtgctgtggcaagaccaggagaatctcgtgttgaacgaagtgtatctgggcaaggagaaatttgattctgttcatagcaaatacatgggaagaacctcttttgactcagactcttggaccttgcggctgcataacctgcagatcaaagataagggcctctaccagtgtatcatcatacacaagaaacctaccggtatgatccggattcaccaaatgaactccgagctgtctgtactc

SEQ ID NO: 1433 - DNA, 1929 bp, synthetic construct
  misc_feature 1..1929: note = LAG3 104-146 R110K/G130P/R141K-Sugemalimab-CD86 IgV Q25I/F33L/H90I polynucleotide
  source 1..1929: mol_type = other DNA
gttggaccagggggcctcaagagtggtagactcccccttcagccacgggtacaactggatgaaaggggccgccaacgcccagatttttccctgtggttgagacccgcaaggaaagcagacgccggagaggggggcggggggagcggaggaggtggttctgggggaggggggtccggcggaggagggagtggtgaagttcaactcctcgaaagtggcgggggactggtgcagcctggcgggagtctccgactgtcttgcgctgcctccggatttaccttcagcagctacgccatgagttgggttaggcaggcccccggaaaaggtctcgaatgggtgtccgggatttcagggtccggcggatttacctactacgcggacagcgtgaagggccggtttacgattagccgggacaactcaaagaatactctctaccttcaaatgaatagccttcgggctgaggacaccgctgtttattactgtgccaaaccccctcgcgggtacaactatggcccctttgactactggggccaaggaactctggtgaccgtttccagcgccagtaccaaaggacccagtgtttttccccttgccccttgcagtcgcagcacaagcgaaagcactgcagccctcggctgcctggtcaaagactacttccctgagcccgtgacagtctcatggaactctggagccctcaccagcggggtacataccttccccgccgttttgcaaagctctgggctgtactctctgagcagcgttgtgaccgtcccatcctcctccctcggaaccaaaacctacacttgtaacgtcgaccacaaaccaagcaatacaaaagtggataagcgcgtggagagtaaatacggcccaccttgcccaccatgtcctgctcccgaattcctgggcggtccttccgtcttcctgttcccacccaagccaaaggataccctgatgatttcccggaccccagaggttacctgtgtggttgtagatgtctctcaggaagacccagaagtacagttcaactggtacgtcgacggggtggaggtgcataacgcaaagactaaaccacgggaagagcagtttaacagcacatacagagtcgtctccgtcctgacagttctgcaccaggactggctgaacggcaaggagtacaagtgcaaggtgtcaaataagggcctgccctctagcattgagaaaaccattagcaaggcaaaaggccagcctagagagccacaggtctacacactccctcctagccaggaggaaatgacaaagaaccaggtaagcctcacatgcctggtgaaagggttttatccatcagacatcgccgtggagtgggagtccaacggacagcctgaaaataactataagacgacacctcctgtcctggactcagatggtagtttctttctttactccaggctcaccgtggacaagagcagatggcaggagggcaacgtgtttagctgcagtgtgatgcacgaggccctccataaccattacacccaaaagtccctcagcctgagcttgggtgctggcggtgggggctccgggggaggaggctccggcggaggcggtagcggcggaggcggatctggagctcctctcaagatccaagcttattttaacgagactgccgacctgccctgccagttcgctaatagccaaaatataagcctgtccgagctggtcgtattgtggcaagaccaagaaaatctggtgctgaatgaggtgtaccttggtaaggagaaattcgacagtgtgcattcaaaatacatgggcagaacaagtttcgactcagacagctggaccctgagactccataaccttcagataaaggacaagggattgtatcagtgtattatcattcacaagaagcccacaggcatgatcagaatccaccagatgaactcagaactcagcgtcctc